(19) United States
(12) Patent Application Publication
(10) Pub. No.: US 2016/0319367 A1
(43) Pub. Date: Nov. 3, 2016

(54) MEANS AND METHODS FOR TYPING A BREAST CANCER PATIENT AND ASSIGNING THERAPY BASED ON THE TYPING

(71) Applicant: STICHTING HET NEDERLANDS KANKER INSTITUUT-ANTONI VAN LEEUWENHOEK ZIEKENHUIS, Amsterdam (NL)

(72) Inventors: Rene Bernards, Amsterdam (NL); Sander Valentijn Maria Canisius, Amsterdam (NL); Willem Teunis Zwart, Amsterdam (NL); Eleonore Marielle Hijmans, Amsterdam (NL); Hendrika Maria Oosterkamp, Amsterdam (NL)

(21) Appl. No.: 15/104,863

(22) PCT Filed: Dec. 17, 2014
(86) PCT No.: PCT/NL2014/050870

§ 371 Date: Jun. 15, 2016

(30) Foreign Application Priority Data
Dec. 17, 2013 (EP) 13197871.0

(51) Int. Cl. C12Q 1/68

(52) U.S. Cl. CPC C12Q 1/6886; C12Q 2600/158; C12Q 2600/106

(57) ABSTRACT

The invention relates to a method of predicting whether a breast cancer patient is or becomes resistant to anti-estrogen directed therapy. More specifically, the invention relates to methods and means for typing of breast cancer cells as having a good or a poor outcome to anti-estrogen directed therapy. The invention further relates to methods of assigning therapy to a breast cancer patient.

### FIELD OF THE INVENTION

[0001] The invention relates to the field of oncology. More specifically, the invention relates to a method for typing breast cancer cells. The invention provides means and methods for classification of breast cancer cells and provides a treatment protocol based on the typing of the cells.

### BACKGROUND OF THE INVENTION

[0002] About 70% of human breast cancers are ERα positive and depend on this hormone receptor for their proliferation (Harvey et al., 1999. J Clin Oncol 17: 1474-81), rendering ERα an ideal target for endocrine treatment. Tamoxifen is one of the most commonly used drugs in the management of ERα positive breast cancer. In early breast cancer, 5 years of adjuvant treatment with tamoxifen almost halves the rate of disease recurrence and reduces the annual breast cancer death rate by one-third (EBCTCG, 2005. Lancet 365: 1687-717). Despite this adjuvant treatment with tamoxifen, one-third of women still develop recurrent disease in the next 15 years (EBCTCG, 2005. Lancet 365: 1687-717), illustrating that endocrine resistance is a major problem in the management of breast cancer.

[0003] Several mechanisms may contribute to tamoxifen resistance. At presentation, not all ERα positive tumours are sensitive to tamoxifen. This intrinsic endocrine resistance can be the result of ERα phosphorylation (Musgrove and Sutherland, 2009. Nat Rev Cancer 9: 631-43; Michalides et al., 2004. Cancer Cell 5: 597-605; Campbell et al., 2001. J Biol Chem 276: 9817-24). In addition, intrinsic tamoxifen resistance is found to correlate with increased levels or activity of ERα co-activators (AIB1), growth factor receptors (EGFR, HER2, IGF1R), kinases (AKT and ERK1/2) or adaptor proteins (BCAR1, c-SRC and PAK1) (Musgrove and Sutherland, 2009. Nat Rev Cancer 9: 631-43; Beelen et al., 2012. Nature reviews Clinical oncology 9: 529-41). Loss of CDK10 expression (Iorns et al., 2008. Cancer Cell 13: 91-104) and loss of insulin-like growth factor binding protein 5 (IGFBP5) expression (Ahn et al., 2010. Cancer Res 70: 3013-3019) can also lead to tamoxifen resistance. Furthermore, high levels of lemur tyrosine kinase-3 (LMTK3) or CUEDC2 protein are associated with tamoxifen resistance (Giamas et al., 2011. Nat Med 17: 715-719; Pan et al., Nat Med 17: 708-149). Acquired endocrine resistance develops in a certain proportion of metastasized ERα-positive breast cancer that was initially sensitive to tamoxifen palliative treatment. One possible mechanism of this resistance is upregulation of the PI3K-mTOR pathway, leading to ligand independent phosphorylation of ERα at serine 167 by S6K1 (Yamnik et al., 2009. J Biol Chem 284: 6361-9; Yue et al., 2007. J Steroid Biochem Mol Biol 106: 102-10; Miller et al., 2010. J Clin Invest 120: 2406-13). It is nevertheless likely that additional mechanisms of unresponsiveness to endocrine treatment play a role, that remain to be identified.

### SUMMARY OF THE INVENTION

[0004] To elucidate novel mechanisms of tamoxifen resistance in breast cancer, a shRNA screen was performed in the hormone-dependent human luminal breast cancer cell line ZR-75-1 to identify genes whose suppression can induce tamoxifen resistance. The present inventors surprisingly found that loss of USP9X enhances ERα/chromatin interactions in the presence of tamoxifen, leading to tamoxifen-stimulated gene expression of ERα target genes and cell proliferation.

[0005] The present inventors have developed a gene expression profile that is indicative of the activity of USP9X in a breast cancer cell in the presence of tamoxifen. Methods of typing a sample from a breast cancer patient to determine the presence or absence of activity of USP9X, comprise determining the level of expression of genes from the gene profile.

[0006] The invention provides a method of typing a sample from a breast cancer patient that is treated with tamoxifen, the method comprising determining a level of expression for USP9X and/or for at least two genes that are selected from Table 1 in a relevant sample from the breast cancer patient, whereby the sample comprises expression products from a cancer cell of the patient; comparing said determined level of expression of USP9X or of the at least two genes to the level of expression of USP9X or the at least two genes in a reference; and typing said sample as being responsive to treatment with tamoxifen or not, based on the comparison of the determined levels of expression.

[0007] In a preferred method according to the invention, the sample is typed by determining a level of RNA expression for at least two genes that are selected from Table 1 and comparing said determined RNA level of expression to the level of RNA expression of the at least two genes in a reference. Said reference is preferably a measure of the average level of said at least two genes in at least 10 independent individuals.

[0008] A further preferred method according to the invention comprises determining a level of expression of at least five genes from Table 1, more preferred 10 genes from Table 1, more preferred 20 genes from Table 1, more preferred 50 genes from Table 1, more preferred 100 genes from Table 1, more preferred all genes from Table 1.

[0009] The invention further provides a method of assigning anti-estrogen receptor-directed therapy (antiER) comprising tamoxifen to a breast cancer patient, comprising typing a sample from the breast cancer patient with a method according to the invention; and assigning anti-estrogen receptor-directed therapy comprising tamoxifen to a patient of which the sample is typed as being responsive to treatment with tamoxifen.

[0010] The invention further provides a method of assigning further antiER directed therapy or chemotherapy to a breast cancer patient, comprising typing a sample from the breast cancer patient with a method according to the invention; and assigning chemotherapy to a patient of which the sample is typed as being non-responsive to treatment with tamoxifen.

[0011] Said further antiER directed therapy comprises the administration of a selective estrogen receptor modulator not being tamoxifen, an aromatase inhibitor, preferably anastrozole, and/or GnRH or a GnRH-analogue.

[0012] Said chemotherapy preferably comprises administration of a platinum agent, preferably cisplatin, and/or a PARP inhibitor, preferably ABT-888.

### BRIEF DESCRIPTION OF THE FIGURES

[0013] FIG. 1. shRNA screen identifies USP9X involvement in tamoxifen resistance

[0014] (A) Set up of the screen. ZR-75-1 cells stably expressing the murine ecotropic receptor were infected with retroviral supernatants containing a selection of the NM pRS-shRNA library divided in 44 pools—each pool contains 285 distinct short hairpin RNA's against 95 genes—or pRS as control. After puromycin selection 2×105 cells of each pool and control were plated in 15 cm dishes and cultured in DMEM with 1 μM 4OH-tamoxifen for 4-6 weeks. Tamoxifen resistant individual colonies were isolated and one of the rescuing shRNAs was identified as USP9X.

[0015] (B) Knockdown of USP9X rescues tamoxifen induced growth arrest. ZR-75-1 cells were infected with the single shRNA against USP9X recovered from the initial screen or pRS-GFP as control. Cells were cultured for 4-6 weeks in the presence of 1 μM 4OH-tamoxifen. When colonies appeared, cells were fixed and stained.

[0016] (C) USP9X hit validation. Five independent shRNAs targeting different regions of the USP9X gene were designed and colony formation assays with ZR-75-1 cells infected with each shRNA were performed. Rescue from tamoxifen induced growth arrest by USP9X knockdown was validated by three independent shRNAs.

[0017] (D) Knockdown of USP9X decreases USP9X mRNA levels.

[0018] (E) Knockdown of USP9X decreases USP9X protein levels.

[0019] (F) Knockdown of USP9X rescues tamoxifen-induced growth arrest in T47D cells. T47D cells were infected with the shRNA against USP9X recovered from the initial screen, pRS-USP9X II or pRS-GFP as control. Cells were cultured for 4-6 weeks in the presence of 1 μM 4OHtamoxifen. When colonies appeared cells were fixed and subsequently stained.

[0020] FIG. 2. Knockdown of USP9X increases ERα activity

[0021] (A) Knockdown of USP9X increases activity on an ERE luciferase reporter in serum supplemented DMEM, in the absence and presence of tamoxifen. Data are represented as mean and standard deviation (SD) of three independent experiments.

[0022] (B) Knockdown of USP9X increases ERE luciferase in hormone-deprived, estradiol and 4OH20 tamoxifen treated cells. Data are represented as mean and SD of three independent experiments.

[0023] (C) USP9X knockdown in the presence of estradiol increases mRNA levels of the ERα target genes PGR, TFF1 and ERα. Data are represented as mean and SD of three independent experiments.

[0024] (D) Knockdown of USP9X increases ERα and PR protein levels in hormone-deprived, estradiol or 4OH-tamoxifen treated cells.

[0025] FIG. 3. Physical interactions between USP9X and ERα

[0026] (A) Exogenous expressed ERα binds to endogenous USP9X in Phoenix cells. 48 hours after transfection with ERα, immunoprecipitations were performed for either anti-ERα (third lane) or anti-USP9X (fourth lane) and Westerns were stained for ERα and USP9X. The first lane shows 10% input of the whole cell lysate (wcl), the second lane shows immunoprecipitation with normal mouse serum (nms) as control.

[0027] (B) Endogenous ERα binds to endogenous USP9X in ZR-75-1 breast cancer cells. (Experimental conditions were identical to A).

[0028] FIG. 4. USP9X loss selectively enhances ERα/chromatin interactions upon tamoxifen treatment. Hormone-deprived monoclonal ZR-75-1 cells stably expressing pRS-USP9X or pRS-GFP as control were treated with vehicle (veh), estradiol (E2), or 4OH-tamoxifen (4-OHT) after which ChIP-seq analysis was performed on ERα.

[0029] (A) ERα ChIP-seq signal in control cells (top part) and shUSP9X cells (lower part) in the presence of indicated ligand. Tag counts (Y-axis) and genomic locations (X-axis) are indicated.

[0030] (B) Heatmap visualization, depicting a vertical alignment of all identified peaks of control (shGFP, left) and USP9XKD (shUSP9X, right) raw read counts of veh, E2, or 4-OHT treated cells. Arrowhead indicates top of the peak and scale bar is indicated.

[0031] (C) Read count quantification of data presented in Fig. B showing enrichment of ERα/DNA interactions in the presence of 4-OHT in the shUSP9X cells compared to the control (shGFP) cells. Y-axis: average tag count (arbitrary units). X-axis shows distance from centre of the peak (−2.5 kb, +2.5 kb).

[0032] (D) Venn diagrams showing a significant increase in the number of ERα/chromatin binding events in the shUSP9X (right) cells compared to control (shGFP) cells (left) in the presence of 4-OHT, representing a subset of the E2-induced binding patterns. Numbers indicate binding events in each subgroup (veh; dark grey, E2; black, 4-OHT; light gray).

[0033] (E) Venn diagrams showing shared and unique peaks for control cells (left hand circles) and shUSP9X cells (right hand circles) under vehicle (left), E2 (middle) and 4-OHT (right) conditions. Numbers indicate binding events in each subgroup.

[0034] (F) Genomic distributions of peaks under all tested conditions. Locations are indicated relative to the most proximal genes. 4-OHT shUSP9X unique: unique binding sites in tamoxifen treated shUSP9X cells as compared to tamoxifen-treated control cells.

[0035] (G) De novo motif enrichment analysis identified ESR motifs enriched for 4-OHT shUSP9X unique peaks and peaks shared by 4-OHT-treated shGFP control cells and shUSP9X cells.

[0036] FIG. 5. USP9X and global gene expression analyses Hormone-deprived monoclonal ZR-75-1 cells stably expressing pRS-USP9X or pRS-GFP as control were treated with vehicle (veh), estradiol (E2), or 4OH-tamoxifen (4-OHT) after which RNA-seq analysis was performed.

[0037] (A) Left panel: Venn diagram showing differentially expressed genes in control cells (shGFP) after treatment with E2 (black) or 4-OHT, (grey), as compared to vehicle control (p<0.05). The 1906 differentially expressed genes after 4-OHT treatment represent a subset of the 8794 E2 induced genes. Right panel: Venn diagram showing differentially expressed genes after E2 treatment in control cells (left hand circle) and differentially expressed genes in 4-OHT-treated shUSP9X cells compared to 4-OHT-treated control (right hand circle). Differentially expressed genes in 4-OHT-treated shUSP9X cells represent a subset of E2-responsive genes in the control cells.

[0038] (B) Proximal ERα binding events for differentially expressed genes in 4-OHT-treated shUSP9X cells. ERα binding events found only in 4-OHT-treated control cells (left), 4-OHTtreated shUSP9X cells (middle) or shared between both conditions (right) were analysed for proximal binding (<20 kb) to transcription start sites of differential expressed genes in 4-OHTtreated shUSP9X cells and 4-OHT-treated control cells. Y-axis shows absolute number of differentially expressed genes.

[0039] (C) Average ERα read count intensity of ERα chromatin binding sites in 4-OHT-treated shUSP9X cells, proximal to (<20 kb) TSS regions of genes, differential expressed between 4-OHT-treated shUSP9X cells and 4-OHT-treated control cells. Y-axis shows average read count (a.u.). X-axis distance from centre of the peak (−2.5 kb, +2.5 kb).

[0040] (D) USP9X-differentially expressed genes in the presence of 4-OHT, with proximal ERα binding sites, were analysed for containing genes from the Perou-signature basal and luminal genes. Y-as shows percentage.

[0041] (E) Heatmap showing differentially expressed genes between 250 patients with primary ERα-positive breast cancer who received adjuvant tamoxifen. X-axis: patients. Y-axis: genes.

[0042] (F) Left panel: A USP9X knockdown tamoxifen gene signature identifies breast cancer patients with poor outcome after adjuvant tamoxifen treatment. Kaplan-Meier survival curves for distant metastasis free survival (DMFS) in a publically available cohort of primary ERα positive breast cancer patients treated with adjuvant tamoxifen (n=250). Middle panel: The USP9X knockdown tamoxifen gene signature is validated in a second cohort of primary ERα positive breast cancer patients treated with adjuvant tamoxifen. Kaplan-Meier survival curves for DMFS in a cohort of primary ERα positive breast cancer patients treated with adjuvant tamoxifen (n=134). Right panel: The USP9X knockdown tamoxifen gene signature does not correlate with outcome in breast cancer patients who did not receive any adjuvant endocrine treatment. Kaplan-Meier survival curves for DMFS in a cohort of primary ERα positive breast cancer patients that did not receive adjuvant endocrine treatment (n=209).

[0043] FIG. 6 Validation of the USP9X classifier in independent patient cohorts Validation of the 155 genes USP9X classifier in 5 independent cohorts. Cohort 1, cross-validated predictions (GSE6532; Loi et al., 2007. J Clin Oncol 25: 1239-46); cohort 2 (GSE12093; Zhang et al., 2009. Breast Cancer Res Treat 116: 303-9), cohort 3 (GSE26971; Filipits et al., 2011. Clin Cancer Res 17:6012-20), cohort 4 (GSE9195; Loi et al., 2008. BMC Genomics 9:239), and cohort 5 (GSE17705; Symmans et al., 2010. J Clin Oncol 28:4111-9).

[0044] FIG. 7 Validation of a minimal USP9X classifier in independent patient cohorts Validation of a 5 genes USP9X classifier in 5 independent cohorts. Cohort 1, cross-validated predictions (GSE6532; Loi et al., 2007. J Clin Oncol 25: 1239-46); cohort 2 (GSE12093; Zhang et al., 2009. Breast Cancer Res Treat 116: 303-9), cohort 3 (GSE26971; Filipits et al., 2011. Clin Cancer Res 17:6012-20), cohort 4 (GSE9195; Loi et al., 2008. BMC Genomics 9:239), and cohort 5 (GSE17705; Symmans et al., 2010. J Clin Oncol 28:4111-9).

[0045] FIG. 8 Performance of 200 random subsets of between 2 and 50 genes from the USP9X, in comparison to the performance of the USP9X signature, and in comparison to the separation of poor survival from good survival.

### DETAILED DESCRIPTION OF THE INVENTION

[0046] The term USP9X, as used herein, refers to a ubiquitin specific peptidase 9 which is X-linked. Alternative names for this gene are ubiquitin specific protease 9, X-linked; FAF-X; Drosophila Fat Facets related, X-Linked (DFFRX); Fat Facets Protein-Related, X-Linked; and Ubiquitin Thioesterase.

[0047] The term tamoxifen, as used herein, refers to a compounds that bind to the estrogen receptor and that blocks the effects of the hormone estrogen on cancer cells, thereby lowering the chance that breast cancer cells will grow. The term tamoxifen includes the compound tamoxifen ((Z)2-[4-(1,2-diphenyl-1-butenyl) phenoxy]-N, N-dimethylethanamine 2-hydroxy-1,2,3-propanetricarboxylate (1:1)) and variants thereof such as toremifene (2-{4-[(1Z)-4-chloro-1,2-diphenyl-but-1-en-1-yl]phenoxy}-N,N-dimethylethanamine).

[0048] The term further antiER directed therapy, as used herein, refers to compounds that modulate the levels of estrogen, the binding of estrogen to the receptor, and/or gene activation by the estrogen receptor. The term further antiER directed therapy excludes tamoxifen. Examples of further antiER directed therapy are provided by selective estrogen receptor modulators apart from tamoxifen, GnRH or a GnRH-analogue and/or of an aromatase inhibitor.

[0049] The term typing refers to the classification of a sample from a cancer patient, preferably a breast cancer patient. Said typing is preferably used to predict whether the individual has a high risk of being or becoming resistant to treatment with anti-estrogen receptor-directed therapy selected from tamoxifen, or a low risk of being or becoming resistant to treatment with said anti-estrogen receptor-directed therapy. For this, the level of expression of USP9X or of at least two genes of the set of genes selected from Table 1 is determined in a relevant sample from the individual. Modulation of the level of expression of USP9X, when compared to the level of expression of USP9X in a reference, or modulation of the level of expression of the at least two genes of the set of genes selected from Table 1, compared to the level of expression of the at least two genes of the set of genes selected from Table 1 in a reference, is indicative of a high risk of being or becoming resistant to treatment with tamoxifen.

[0050] The term sample, as used herein, refers to a relevant sample comprising expression products from a cancer cell of the patient, preferably a breast cancer cell. Said sample is preferably derived from a primary or metastasized breast cancer. A sample comprising expression products from a cancer cell of an individual suffering from breast cancer is provided after the removal of all or part of a cancerous growth from the individual, for example after biopsy. For example, a sample comprising expression products may be obtained from a needle biopsy sample or from a tissue sample comprising breast cancer cells that was previously removed by surgery. The surgical step of removing a relevant tissue sample, preferably a part of the cancer, from an individual is not part of a method according to the invention. It is preferred that at least 10% of the cells or tissue from which a relevant sample comprising expression products is derived, are breast cancer cells, more preferred at least 20%, more preferred at least 30%, more preferred at least 50%. The sample may have been fixed, for example a formalin-fixed paraffin-embedded (FFPE) sample.

[0051] The term expression products, as is used herein, refers to protein expression products or, preferably, RNA expression products. A sample from an individual suffering from breast cancer comprising protein expression products from a cancer of the patient can be obtained in numerous ways, as is known to a skilled person. For example, proteins can be isolated from a sample using, for example, cell disruption and extraction of cellular contents. Suitable methods and means are known in the art, such as dounce pestles and sonication methods. In addition, preferred methods include reagent-based lysis methods using detergents. These methods not only lyse cells but also solubilize proteins. Cell disruption may be followed by methods for enrichment of specific proteins, including subcellular fractionation and depletion of high abundant proteins. Differences in protein expression between a sample from an individual suffering from cancer and a reference sample is studied, for example, by two-dimensional (2D) gel electrophoresis and/or mass spectrometry techniques such as, for example, electrospray ionization and matrix-assisted laser desorption ionization.

[0052] The term reference, as used herein, refers to a sample comprising expression products from a related or an unrelated source. A preferred reference comprises expression products from a cancer cell, preferably a breast cancer cell, that is known to be resistant to tamoxifen, from a cancer cell, preferably a breast cancer cell, that is known not to be resistant to tamoxifen, or from a mixture of resistant and non-resistant cancer cells.

[0053] The term functionally inactivated, as used herein, refers to an alteration that diminishes or abolishes the expression and/or activity of USP9X. Said alteration can be a genetic alteration, for example an insertion, a point mutation, or, preferably, two or more point mutations in the gene encoding USPX, or an alteration in one of more genes of which the expression product is involved, preferably required, in a USP9X-mediated activity or pathway.

[0054] The term target protein, as is used herein, refers to the USP9X protein and/or to a protein product of a gene that is depicted in Table 1.

Methods of Typing a Sample from a Breast Cancer Patient

[0055] The present inventors surprisingly found that downregulation of USP9X induces tamoxifen-stimulatory effects on ERα action, leading to resistance to ER-targeting therapy such as tamoxifen. Furthermore, it is shown that a tamoxifen-induced gene expression signature in USP9X knockdown cells can be used to identify cancer patients, especially breast cancer patients, with a poor outcome after tamoxifen treatment and that are likely not to benefit from further tamoxifen treatment.

[0056] As is indicated hereinabove, USP9X is an X-linked ubiquitin-specific peptidase. Ubiquitination serves a role in both protein degradation and regulation of protein function. The level of protein ubiquitination is highly regulated by two families of enzymes with opposing activities: the ubiquitin ligases, which add ubiquitin moieties to proteins and deubiquitinating enzymes (DUBs) that remove them. The X-linked deubiquitinase USP9X is a member of the family of DUB enzymes and regulates multiple cellular functions by deubiquitinating and stabilizing its substrates. USP9X has been shown to regulate, amongst others, cell adhesion molecules like 6-catenin and E-cadherin, cell polarity, chromosome segregation, NOTCH, mTOR and TGF-beta signalling as well as apoptosis (Taya et al., (1998) J Cell Biol 142, 1053-1062; Taya et al., (1999) Genes Cells 4, 757-767; Murray et al., (2004) Mol Biol Cell 15, 1591-1599; Théard et al., (2010) EMBO J 29, 1499-1509; Dupont et al., (2009) Cell 136, 123-35).

[0057] A shRNA screen in the hormone-dependent human luminal breast cancer cell line ZR-75-1 was employed to identify genes whose suppression can induce tamoxifen resistance. An unexpected role for USP9X in the response to tamoxifen was identified. Loss of expression products of USP9X enhance ERα/chromatin interactions in the presence of tamoxifen, leading to tamoxifen stimulated gene expression of ERα target genes and cell proliferation.

[0058] Furthermore, a Tamoxifen-Induced Gene Expression Signature (TIGES) was identified in USP9X knockdown cells that can be used to identify cancer patients, especially breast cancer patients, with a poor outcome after tamoxifen treatment. These genes, as indicated in Tables 1A and 1B, were identified as their relative level of expression was found to be modulated by the presence or absence of USP9X. The term relative is used to indicate that the level of expression was compared to the level of expression in a reference, for example pooled breast cancer samples. The expression of each of the genes depicted in Table 1 correlates with one of two phenotypes. This correlation is represented as a UP or DOWN, indicating upregulation (UP) in the absence of USP9X, and downregulation (DOWN) in the absence of USP9X. For example, upregulation of A1BG or AKT2, and downregulation of ABAT, is indicative of the presence of functionally inactived USP9X.

[0059] Methods of classifying a sample from a breast cancer patient that is treated with anti-estrogen receptor-directed therapy selected from tamoxifen according to the presence or absence of a TIGES profile in a breast cancer cell comprise determining the level of expression of at least 2 genes from the gene profile, as indicated in Table 1. The methods of the invention allow classifying a breast cancer sample as likely to become resistant to treatment with anti-estrogen receptor-directed therapy, or not. Therefore, the TIGES profile allows the functional classification of functional inactivation of USP9X in a breast cancer sample. In addition, the TIGES profile can also be used to classify a sample from a breast cancer patient in which a process or signaling pathway involving USP9X is functionally inactivated by functional inactivation of one or more genes encoding other necessary components of the process or pathway.

[0060] In a preferred method according to the invention, a level of expression of at least five genes from Table 1 is determined, more preferred a level of expression of at least ten genes from Table 1, more preferred a level of expression of at least twenty genes from Table 1, more preferred a level of expression of at least thirty genes from Table 1, more preferred a level of expression of at least forty genes from Table 1, more preferred a level of expression of at least fifty genes from Table 1, more preferred a level of RNA expression of all two hundred thirty four genes from Table 1.

[0061] Said tamoxifen-induced gene expression signature preferably comprises at least two genes from Table 1. Said at least two genes preferably comprise genes with the highest Z-scores. Said at least two genes preferably comprise zinc finger protein 608 ((Z-score −1.008943904) and BUB1 mitotic checkpoint serine/threonine kinase B (Z-score 1.065024239). Said at least two genes preferably comprise zinc finger protein 608 ((Z-score −1.008943904), calpain 2, (m/II) large subunit (Z-score −0.936786567), BUB1 mitotic checkpoint serine/threonine kinase B (Z-score 1.065024239) and centromere protein A (Z-score 1.01511874). Said at least two genes preferably comprise zinc finger protein 608 ((Z-score −1.008943904), calpain 2, (m/II) large subunit (Z-score −0.936786567), FBJ murine osteosarcoma viral oncogene homolog (Z-score −0.920787895), ets homologous factor (Z-score −0.912814779), chondroitin sulfate synthase 1 (Z-score −0.897709367), BUB1 mitotic checkpoint serine/threonine kinase B (Z-score 1.065024239), centromere protein A (Z-score 1.01511874), cell division cycle 45 (Z-score 0.983080062), cell division cycle associated 3 (Z-score 0.97567222), and solute carrier family 25 (mitochondrial thiamine pyrophosphate carrier), member 19 (Z-score 0.974852744).

[0062] It is further preferred that said tamoxifen-induced gene expression signature comprises v-myb avian myeloblastosis viral oncogene homolog-like 2 and chondroitin sulfate synthase 1 (P value 1.25E-06 (Loi); 2.32E-05 (Buffa)), v-myb avian myeloblastosis viral oncogene homolog-like 2 and calpain 2, (m/II) large subunit (P value 1.56E-05 (Loi); 4.59E-05 (Buffa)), BUB1 mitotic checkpoint serine/threonine kinase B and calpain 2, (m/II) large subunit (P value 2.67E-06 (Loi); 1.37E-05 (Buffa)), v-myb avian myeloblastosis viral oncogene homolog-like 2, isocitrate dehydrogenase 3 (NAD+) alpha, and calpain 2, (m/II) large subunit (P value 4.77E-08 (Loi); 2.19E-05 (Buffa)), v-myb avian myeloblastosis viral oncogene homolog-like 2, isocitrate dehydrogenase 3 (NAD+) alpha, and calpain 2, (m/II) large subunit (P value 1.56E-06 (Loi); 4.59E-05 (Buffa)), v-myb avian myeloblastosis viral oncogene homolog-like 2, BUB1 mitotic checkpoint serine/threonine kinase B and calpain 2, (m/II) large subunit (P value 4.90E-05 (Loi); 5.42E-06 (Buffa)), chondroitin sulfate synthase 1, BUB1 mitotic checkpoint serine/threonine kinase B and calpain 2, (m/II) large subunit (P value 4.77E-08 (Loi); 2.19E-05 (Buffa)), and/or v-myb avian myeloblastosis viral oncogene homolog-like 2, chondroitin sulfate synthase 1, isocitrate dehydrogenase 3 (NAD+) alpha, and calpain 2, (m/II) large subunit (P value 6.99E-09 (Loi); 1.70E-05 (Buffa)).

[0063] More preferably, said signature comprises v-myb avian myeloblastosis viral oncogene homolog-like 2, chondroitin sulfate synthase 1 and isocitrate dehydrogenase 3 (NAD+) alpha (P value 7.75E-06 (Loi); 3.34E-08 (Buffa)), v-myb avian myeloblastosis viral oncogene homolog-like 2, chondroitin sulfate synthase 1, isocitrate dehydrogenase 3 (NAD+) alpha and BUB1 mitotic checkpoint serine/threonine kinase B (P value 8.95E-07 (Loi); 5.78E-08 (Buffa)), v-myb avian myeloblastosis viral oncogene homolog-like 2, chondroitin sulfate synthase 1, isocitrate dehydrogenase 3 (NAD+) alpha, BUB1 mitotic checkpoint serine/threonine kinase B and calpain 2, (m/II) large subunit (P value 6.36E-07 (Loi); 2.28E-07 (Buffa)), and/or chondroitin sulfate synthase 1, isocitrate dehydrogenase 3 (NAD+) alpha, BUB1 mitotic checkpoint serine/threonine kinase B and calpain 2, (m/II) large subunit (P value 3.70E-07 (Loi); 4.46E-07 (Buffa)).

[0064] The term P value (Loi) refers to the P-value obtained from a set of 250 ER+ patients that were treated with tamoxifen, as described in Loi et al., 2007. J Clin Oncol 25: 1239-46. The term P value (Buffa) refers to the P-value obtained from a set of 134 ER+ patients that were treated with tamoxifen, as described in Buffa et al., 2011. Cancer Res 71: 5635-45.

[0065] A preferred subset comprises calpain 2 (CAPN2). A further preferred subset comprises CAPN2 and BUB1B. A further preferred subset comprises MYBL2, IDH3A, CHSY1, BUB1B, CAPN2. A selection of MYBL2, IDH3A, CHSY1, BUB1B, CAPN2 gave rise to the largest survival differences among 5 independent cohorts that were tested: Cohort 1 (GSE6532; Loi et al., 2007. J Clin Oncol 25: 1239-46); cohort 2 (GSE12093; Zhang et al., 2009. Breast Cancer Res Treat 116: 303-9), cohort 3 (GSE26971; Filipits et al., 2011. Clin Cancer Res 17:6012-20), cohort 4 (GSE9195; Loi et al., 2008. BMC Genomics 9:239), and cohort 5 (GSE17705; Symmans et al., 2010. J Clin Oncol 28:4111-9).

[0066] Downregulation of USP9X and/or modulation of the expression of at least two of the genes identified in Table 1, can be monitored at the RNA and protein level. Quantitation of the expression of a gene at the protein level can be either in absolute amount (e.g., μg/ml) or a relative amount (e.g., relative intensity of signals). Usually such procedures are performed by dedicated biochemical assays, such as chromatographic, mass spectrometric or hybridization assays.

[0067] Preferred chromatographic assays include Western-blotting assays, following one- or two-dimensional gel electrophoresis.

[0068] Hybridization techniques, such as ELISA techniques, immunohistochemistry (IHC), and in situ hybridization, and are very suitable to determine the concentration of a protein in a biological sample. Such techniques preferably involve the production of a calibration curve of label intensity, for example fluorescence intensity, vs. protein concentration, or the use of a competitive ELISA format, wherein known amounts of unlabeled protein are provided in the test. Alternatively, multiple sandwich ELISA can be developed using as second antibody, for instance an antibody raised by peptide immunisation against a second epitope of the target protein (a second synthetic peptide), or against a determinant that is formed by a complex that is formed between the target protein and the antibody.

[0069] In this regard, it is preferred to generate a non-natural intermediate, for example an antibody-gene product complex, by reaction of the sample with a first antibody that is directed against the target protein, followed by the application of a detection agent that detects the antibody-target protein complex. It is noted that the antibody-target protein complex does not exist in nature.

[0070] Preferred mass spectrometric assays include liquid chromatography-mass spectrometry (LC-MS, or alternatively HPLC-MS), tandem mass spectrometry (MS-MS), matrix assisted laser desorption (MALDI); matrix assisted laser desorption/ionisation time-of-flight (MALDI-TOF), MALDI-Fourier transform ion cyclotron resonance (MALDI-FTICR).

[0071] Methods to quantify expression levels of USP9X and/or of at least two of the genes identified in Table 1 at the RNA level are known to a skilled person and include, but are not limited to, Northern blotting, quantitative Polymerase chain reaction (qPCR), also termed real time PCR (rtPCR), microarray analysis and RNA sequencing, preferably next generation sequencing such as whole transcriptome shotgun sequencing. The term qPCR refers to a method that allows amplification of relatively short (usually 100 to 1000 basepairs) of DNA sequences. In order to measure messenger RNA (mRNA), the method involves a reverse transcriptase to convert mRNA into complementary DNA (cDNA) which is then amplified by PCR. The amount of product that is amplified can be quantified using, for example, TaqMan® (Applied Biosystems, Foster City, Calif., USA), Molecular Beacons, Scorpions® and SYBR® Green (Molecular Probes). Methods such as self sustained sequence replication (3SR), loop mediated isothermal amplification (LAMP), strand displacement amplification (SDA), rolling circle amplification (RCA) and quantitative nucleic acid sequence based amplification (qNASBA) can be used as an alternative for qPCR, as is known to the skilled person.

[0072] RNA may be isolated from a sample by any technique known in the art, including but not limited to Trizol (Invitrogen; Carlsbad, Calif.), RNAqueous® (Applied Biosystems/Ambion, Austin, Tx), Qiazol® (Qiagen, Hilden, Germany), RNeasy Isolation Kit (Qiagen, Hilden, Germany) Agilent Total RNA Isolation Kits (Agilent; Santa Clara, Calif.), RNA-Bee® (Tel-Test. Friendswood, Tex.), and Maxwell™ Total RNA Purification Kit (Promega; Madison, Wis.). A preferred RNA isolation procedure involves the use of Qiazol® (Qiagen, Hilden, Germany). A further preferred RNA isolation procedure involves the use of the Qiagen RNeasy FFPE RNA isolation Kits (Qiagen, Hilden, Germany). RNA can be extracted from a whole sample or from a portion of a sample generated from the cell sample by, for example, section or laser dissection.

[0073] A preferred method for determining a level of RNA expression is microarray analysis. For microarray analysis, a hybridization mixture is prepared by extracting and labelling of RNA. The extracted RNA is preferably converted into a labelled sample comprising either complementary DNA (cDNA) or cRNA using a reverse-transcriptase enzyme and labelled nucleotides. A preferred labelling introduces fluorescently-labelled nucleotides such as, but not limited to, cyanine-3-CTP or cyanine-5-CTP. Examples of labelling methods are known in the art and include Low RNA Input Fluorescent Labelling Kit (Agilent Technologies), MessageAmp Kit (Ambion) and Microarray Labelling Kit (Stratagene).

[0074] A labelled sample may comprise two dyes that are used in a so-called two-colour array. For this, the sample is split in two or more parts, and one of the parts is labelled with a first fluorescent dye, while a second part is labelled with a second fluorescent dye. The labelled first part and the labelled second part are independently hybridized to a microarray. The duplicate hybridizations with the same samples allow compensating for dye bias.

[0075] More preferably, a sample is labelled with a first fluorescent dye, while a reference, for example a sample from a breast cancer pool or a sample from a relevant cell line or mixture of cell lines, is labelled with a second fluorescent dye (known as dual channel). The labelled sample and the labelled reference are co-hybridized to a microarray.

[0076] Even more preferred, a sample is labelled with a fluorescent dye and hybridized to a microarray without a reference (known as single channel).

[0077] The labelled sample can be hybridized against the probe molecules that are spotted on the array. A molecule in the labelled sample will bind to its appropriate complementary target sequence on the array. Before hybridization, the arrays are preferably incubated at high temperature with solutions of saline-sodium buffer (SSC), Sodium Dodecyl Sulfate (SDS) and bovine serum albumin (BSA) to reduce background due to nonspecific binding, as is known to a skilled person.

[0078] The arrays are preferably washed after hybridization to remove labelled sample that did not hybridize on the array, and to increase stringency of the experiment by reducing cross hybridization of the labelled sample to a partial complementary probe sequence on the array. An increased stringency will substantially reduce non-specific hybridization of the sample, while specific hybridization of the sample is not substantially reduced. Stringent conditions include, for example, washing steps for five minutes at room temperature 0.1× Sodium chloride-Sodium Citrate buffer (SSC)/0.005% Triton X-102. More stringent conditions include washing steps at elevated temperatures, such as 37 degrees Celsius, 45 degrees Celsius, or 65 degrees Celsius, either or not combined with a reduction in ionic strength of the buffer to 0.05×SSC or 0.01×SSC as is known to a skilled person.

[0079] Image acquisition and data analysis can subsequently be performed to produce an image of the surface of the hybridised array. For this, the slide can be dried and placed into a laser scanner to determine the amount of labelled sample that is bound to a target spot. Laser excitation yields an emission with characteristic spectra that is indicative of the labelled sample that is hybridized to a probe molecule. In addition, the amount of labelled sample can be quantified.

[0080] The level of expression, preferably mRNA expression levels of genes depicted in Table 1, is preferably compared to levels of expression of the same genes in a template. A template is preferably an RNA sample isolated from a tissue of a healthy individual, preferably comprising breast cells. A preferred template comprises a RNA sample from a relevant cell line or mixture of cell lines. The RNA from a cell line or cell line mixture can be produced in-house or obtained from a commercial source such as, for example, Stratagene Human Reference RNA. A further preferred template comprises RNA isolated and pooled from normal breast tissue that is adjacent to the cancer tissue.

[0081] A more preferred template comprises an RNA sample from an individual suffering from breast cancer, more preferred from multiple individuals suffering from breast cancer. It is preferred that said multiple samples are pooled from more than 10 individuals, more preferred more than 20 individuals, more preferred more than 30 individuals, more preferred more than 40 individuals, most preferred more than 50 individuals. A most preferred template comprises a pooled RNA sample that is isolated from tissue comprising breast cancer cells from multiple individuals suffering from breast cancer.

[0082] As an alternative, a static template can be generated which enables performing single channel hybridizations. A preferred static template is calculated by measuring the median/mean background-subtracted level of expression (for example green-median/MeanSignal or red-median/MeanSignal) of a gene across 1-5 hybridization replicates of a probe sequence. The level of expression may be normalized as is known by a skilled person. Subsequently, a log transformation of each gene/probe gene signal is generated. With this transformation, the variance is stabilized (as with linear values as the signal gets higher the variance also increases; it compresses the range of data) and it makes the data more normally distributed, which allows statistics to be applied to the data. The signal intensity measurements obtain a distribution that is closer to a normal distribution with the variation being independent of the magnitude, allowing statistics to be applied to the data.

[0083] Typing of a sample can be performed in various ways. In one method, a coefficient is determined that is a measure of a similarity or dissimilarity of a sample with said template. A number of different coefficients can be used for determining a correlation between the RNA expression level in an RNA sample from an individual and a template. Preferred methods are parametric methods which assume a normal distribution of the data.

[0084] The result of a comparison of the determined expression levels with the expression levels of the same genes in at least one template is preferably displayed or outputted to a user interface device, a computer readable storage medium, or a local or remote computer system. The storage medium may include, but is not limited to, a floppy disk, an optical disk, a compact disk read-only memory (CD-ROM), a compact disk rewritable (CD-RW), a memory stick, and a magneto-optical disk.

[0085] The expression data are preferably normalized. Normalization refers to a method for adjusting or correcting a systematic error in the measurements of detected label.

[0086] Systemic bias results in variation by inter-array differences in overall performance, which can be due to for example inconsistencies in array fabrication, staining and scanning, and variation between labelled RNA samples, which can be due for example to variations in purity. Systemic bias can be introduced during the handling of the sample in a microarray experiment.

[0087] To reduce systemic bias, the determined RNA levels are preferably corrected for background non-specific hybridization and normalized using, for example, Feature Extraction software (Agilent Technologies). Other methods that are or will be known to a person of ordinary skill in the art, such as a dye swap experiment (Martin-Magniette et al., Bioinformatics 21:1995-2000 (2005)) can also be applied to normalize differences introduced by dye bias. Normalization of the expression levels results in normalized expression values.

[0088] Conventional methods for normalization of array data include global analysis, which is based on the assumption that the majority of genetic markers on an array are not differentially expressed between samples [Yang et al., Nucl Acids Res 30: 15 (2002)]. Alternatively, the array may comprise specific probes that are used for normalization. These probes preferably detect RNA products from housekeeping genes such as glyceraldehyde-3-phosphate dehydrogenase and 18S rRNA levels, of which the RNA level is thought to be constant in a given cell and independent from the developmental stage or prognosis of said cell.

[0089] Therefore, a preferred method according to the invention further comprises normalizing the determined RNA levels of said set of at least ten of the genes listed in Table 1 in said sample.

[0090] Said normalization preferably comprises previously mentioned global analysis “median centering”, in which the “centers” of the array data are brought to the same level under the assumption that the majority of genes are not changed between conditions (with median being more robust to outliers than the mean). Said normalization preferably comprises Lowess (LOcally WEighted Scatterplot Smoothing) local regression normalization to correct for both print-tip and intensity-dependent bias (for dual channel arrays) or “quantile normalization” (which transforms all the arrays to have a common distribution of intensities) for single channel arrays

[0091] In a preferred embodiment, genes are selected of which the RNA expression levels are largely constant between individual tissue samples comprising cancer cells from one individual, and between tissue samples comprising cancer cells from different individuals. It will be clear to a skilled artisan that the RNA levels of said set of normalization genes preferably allow normalization over the whole range of RNA levels. An example of a set of normalization genes is provided in WO 2008/039071, which is hereby incorporated by reference.

[0092] The levels of expression of genes from the TIGES signature in a sample of a patient are compared to the levels of expression of the same genes in a reference. Said comparison may result in an index score indicating a similarity of the determined expression levels in a sample of a patient with the expression levels in the reference. For example, an index can be generated by determining a fold change/ratio between the median value of gene expression across samples that have been typed as being responsive to treatment with tamoxifen and the median value of gene expression across samples that are typed as being non-responsive to treatment with tamoxifen. The significance of this fold change/ratio as being significant between the two respective groups can be tested primarily in an ANOVA (Analysis of variance) model. Univariate p-values can be calculated in the model and after multiple correction testing (Benjamini & Hochberg, 1995, JRSS, B, 57, 289-300) can be used as a threshold for determining significance that the gene expression shows a clear difference between the groups. Multivariate analysis may also be performed in adding covariates such as hormone expression, tumor stage/grade/size into the ANOVA model. Significant genes can be imputed into a prediction model such as Diagonal Linear Discriminant analysis (DLDA) to determine the minimal and most reliable group of gene signals that can predict the factor (response to therapy).

[0093] As an alternative, an index can be determined by Pearson correlation between the expression levels of the genes in a sample of a patient and the expression levels in one or more breast cancer samples that are known to respond to tamoxifen, and the average expression levels in one or more breast cancer samples that are known not to respond to tamoxifen. The resultant Pearson scores can be used to provide an index score. Said score may vary between +1, indicating a prefect similarity, and −1, indicating a reverse similarity. Preferably, an arbitrary threshold is used to type samples as being responsive or as not being responsive. More preferably, samples are classified as responsive or as not responsive based on the respective highest similarity measurement. A similarity score is preferably displayed or outputted to a user interface device, a computer readable storage medium, or a local or remote computer system.

### Methods of Assigning Treatment to a Breast Cancer Patient

[0094] The present invention further provides a method of assigning treatment to a breast cancer patient, the method comprising typing a sample from the breast cancer patient with a method according to the invention, and assigning treatment comprising tamoxifen to a patient of which the sample is typed as being responsive to treatment with tamoxifen.

[0095] Tamoxifen and tamoxifen derivatives such as toremifene, are known antagonistic compounds of the estrogen receptor. Methods for providing tamoxifen and/or toremifene to an individual in need thereof suffering from breast are known in the art. For example, tamoxifen may be administered at 20 to 200 mg/kg per day, for example as Tamoxifen Citrate Tablets USP for oral administration. Toremifene similarly can be administered as toremifene citrate at 10 to 800 mg/d orally.

[0096] The present invention further provides a method of not assigning tamoxifen-comprising therapy to a breast cancer patient, comprising typing a sample from the breast cancer patient with a method according to the invention; and not assigning tamoxifen to a patient of which the sample is typed as being non-responsive to treatment with tamoxifen. Said method preferably comprises the assignment of further antiER directed therapy and/or chemotherapy to a breast cancer patient of which the sample is typed as being non-responsive to treatment with tamoxifen.

[0097] Said further antiER directed therapy comprises selective estrogen receptor modulators (SERM), not including tamoxifen, GnRH or a GnRH-analogue and/or of an aromatase inhibitor.

[0098] A preferred non-tamoxifen SERM is provided by fulvestrant (7α,17β)-7-{9-[(4,4,5,5,5-pentafluoropentyl)sulfinyl]nonyl}estra-1,3,5(10)-triene-3,17-diol), which is an estrogen receptor antagonist with no agonist effects, which works by down-regulating the estrogen receptor. It is administered as a once-monthly injection at 500 mg.

[0099] A further preferred non-tamoxifen SERM is provided by raloxifene ([6-hydroxy-2-(4-hydroxyphenyl)-benzothiophen-3-yl]-[4-[2-(1-piperidyl)ethoxy]phenyl]-methanone). It is an estrogen receptor antagonist in breast cells, including breast cancer cells. It can be orally administered at 60-240 mg/kg/day.

[0100] Yet a further preferred non-tamoxifen SERM is provided by lasofoxifene ((5R,6S)-6-phenyl-5-[4-(2-pyrrolidin-1-ylethoxy)phenyl]-5,6,7,8-tetrahydronaphthalen-2-ol). It is an estrogen receptor antagonist in breast cells, including breast cancer cells. It can be orally administered at 0.001 mg/kg-1.0 mg/kg/day.

[0101] A further preferred antiER directed therapy comprises the administration of an aromatase inhibitor. These non-steroidal inhibitors inhibit the synthesis of estrogen via reversible competition for the aromatase enzyme. Preferred aromatase inhibitors include anastrozole (2,2′-[5-(1H-1,2,4-triazol-1-ylmethyl)-1,3-phenylene]bis(2-methylpropanenitrile) and exemestane (6-Methylideneandrosta-1,4-diene-3,17-dione). Anastrozole can be orally administered at 1.0-10 mg/day. Exemestane can be orally administered at 25-50 mg/day

[0102] Yet a further preferred antiER directed therapy comprises the administration of gonadotropin-releasing hormone (GnRH), also known as Luteinizing-hormone-releasing hormone (LHRH) and luliberin. GnRH is a trophic peptide hormone responsible for the release of follicle-stimulating hormone (FSH) and luteinizing hormone (LH) from the anterior pituitary. GnRH is synthesized and released from neurons within the hypothalamus. The peptide belongs to gonadotropin-releasing hormone family. Administration of GnRH lowers the levels of oestrogen and progesterone, resulting in estrogen levels that resemble that of a menopausal or post-menopausal woman.

[0103] As is known to the skilled person, a GnRH-analogue, for example Leuprolide, is a synthetic peptide drug that is modeled after the human GnRH. A GnRH-analogue is designed to interact with the GnRH receptor and modify the release of pituitary gonadotropins FSH and LH for therapeutic purposes. The synthetic hormone is preferably injected (1 and 3 month depot injections are available) or prescribed as nasal spray. However, the nasal spray is rarely used, because a constant and regular drug level is difficult to maintain.

[0104] Yet a further preferred therapy comprises chemotherapy, which includes the use of a chemotherapeutic agent such as an alkylating agent such as nitrogen mustard, e.g. cyclophosphamide, mechlorethamine or mustine, uramustine or uracil mustard, melphalan, chlorambucil, ifosfamide; a nitrosourea such as carmustine, lomustine, streptozocin; an alkyl sulfonate such as busulfan, an ethylenime such as thiotepa and analogues thereof, a hydrazine/triazine such as dacarbazine, altretamine, mitozolomide, temozolomide, altretamine, procarbazine, dacarbazine and temozolomide, which are capable of causing DNA damage; an intercalating agent such as a platinum agent like cisplatin, carboplatin, nedaplatin, oxaliplatin and satraplatin; an antibiotic such as an anthracycline such as doxorubicin, daunorubicin, epirubicin and idarubicin; mitomycin-C, dactinomycin, bleomycin, adriamycin, mithramycin; an antimetabolite such as capecitabine and 5-fluorouracil, gemcitabine, a folate analogue such as methotrexate, hydroxyurea, mercaptopurine, thioguanine; a mitostatic agent such as eribulin, ixabepilone, irinotecan, vincristine, mitoxantrone, vinorelbine and a taxane such as paclitaxel and docetaxel; an inhibitor of the enzyme poly ADP ribose polymerase (PARP), a receptor tyrosine kinase inhibitor such as gefitinib, erlotinib, EKB-569, lapatinib, CI-1033, cetuximab, panitumumab, PKI-166, AEE788, sunitinib, sorafenib, dasatinib, nilotinib, pazopanib, vandetaniv, cediranib, afatinib, motesanib, CUDC-101, and imatinib mesylate; and kinase inhibitors such as a MEK inhibitor including CKI-27, RO-4987655, RO-5126766, PD-0325901, WX-554, AZD-8330, G-573, RG-7167, SF-2626, GDC-0623, RO-5068760, and AD-GL0001; a B-RAF inhibitor including CEP-32496, vemurafenib, GSK-2118436, ARQ-736, RG-7256, XL-281, DCC-2036, GDC-0879, AZ628, and an antibody fragment EphB4/Raf inhibitor; a serine/threonine kinase receptor inhibitor, including an Alk-1 inhibitor such as crizotinib, ASP-3026, LDK378, AF802, and CEP37440, and combinations thereof.

[0105] Said chemotherapy is preferably selected from a platinum agent like cisplatin, carboplatin, oxaliplatin and satraplatin; taxane including paclitaxel and docetaxel, a PARP inhibitor, doxorubicin, daunorubicin, epirubicin, cyclophosphamide, 5-fluorouracil, gemcitabine, eribulin, ixabepilone, methotrexate, mitomycin-C, mitoxantrone, vinorelbine, thiotepa, vincristine, capecitabine, a receptor tyrosine kinase inhibitor and/or irinotecan, and combinations thereof.

[0106] A preferred PARP inhibitor includes 3-aminobenzamide, 4-(3-(1-(cyclopropanecarbonyl)piperazine-4-carbonyl)-4-fluorobenzyl)phthalazin-1(2H)-one (AZD-2281), 8-fluoro-2-{4-[(methylamino)methyl]phenyl}-1,3,4,5-tetrahydro-6H-pyrrolo[4,3,2-ef][2]benzazepin-6-one phosphate (1:1) (AG014699), 2-[(2R)-2-Methylpyrrolidin-2-yl]-1H-benzimidazole-4-carboxamide dihydrochloride benzimidazole carboxamide (ABT-888), and (8S,9R)-5-fluoro-8-(4-fluorophenyl)-9-(1-methyl-1H-1,2,4-triazol-5-yl)-8,9-dihydro-2H-pyrido[4,3,2-de]phthalazin-3(7H)-one (BMN-673).

[0107] More preferably, said chemotherapy comprises administration of a platinum agent and/or a PARP inhibitor. A most preferred platinum agent is cisplatin. A most preferred PARP inhibitor is ABT-888.

TABLE 1A

| Gene | Direction | Gene name |
|---|---|---|
| A1BG | Up | alpha-1-B glycoprotein |
| ABAT | Down | 4-aminobutyrate aminotransferase |
| AKT2 | Up | v-akt murine thymoma viral oncogene homolog 2 |
| ALDH3B1 | Up | aldehyde dehydrogenase 3 family, member B1 |
| AMFR | Up | autocrine motility factor receptor, E3 ubiquitin protein |
| | | ligase |
| ANKRD26 | Down | ankyrin repeat domain 26 |
| AP2S1 | Up | adaptor-related protein complex 2, sigma 1 subunit |
| ARHGAP35 | Down | Rho GTPase activating protein 35 |
| ASCL1 | Up | achaete-scute complex homolog 1 (Drosophila) |
| ASXL1 | Up | additional sex combs like 1 (Drosophila) |
| ATG2B | Down | autophagy related 2B |
| ATN1 | Down | atrophin 1 |
| ATP1B1 | Down | ATPase, Na+/K+ transporting, beta 1 polypeptide |
| BNIPL | Down | BCL2/adenovirus E1B 19 kD interacting protein like |
| BRF2 | Up | BRF2, RNA polymerase III transcription initiation |
| | | factor 50 kDa subunit |
| BUB1B | Up | BUB1 mitotic checkpoint serine/threonine kinase B |
| C12orf60 | Up | chromosome 12 open reading frame 60 |
| C17orf58 | Up | chromosome 17 open reading frame 58 |
| C19orf70 | Up | chromosome 19 open reading frame 70 |
| C1orf122 | Up | chromosome 1 open reading frame 122 |
| C22orf13 | Up | Chromosom22 open reading frame 3 |
| C2CD2L | Down | C2CD2-like |
| C8orf33 | Up | chromosome 8 open reading frame 33 |
| C9orf117 | Down | chromosome 9 open reading frame 117 |
| CACNG4 | Up | calcium channel, voltage-dependent, gamma subunit 4 |
| CACYBP | Up | calcyclin binding protein |
| CALCOCO1 | Down | calcium binding and coiled-coil domain 1 |
| CAP2 | Down | CAP, adenylate cyclase-associated protein, 2 (yeast) |
| CAPN2 | Down | calpain 2, (m/II) large subunit |
| CAPN8 | Down | calpain 8 |
| CAV2 | Down | caveolin 2 |
| CCDC117 | Up | coiled-coil domain containing 117 |
| CCDC47 | Up | coiled-coil domain containing 47 |
| CCDC51 | Up | coiled-coil domain containing 51 |
| CCDC57 | Up | coiled-coil domain containing 57 |
| CCDC88C | Up | coiled-coil domain containing 88C |
| CD7 | Up | cluster of differentiation 7 |
| CDC45 | Up | cell division cycle 45 |
| CDCA3 | Up | cell division cycle associated 3 |
| CELSR2 | Down | cadherin, EGF LAG seven-pass G-type receptor 2 |
| CENPA | Up | centromere protein A |
| CENPT | Up | centromere protein T |
| CERS1 | Up | ceramide synthase 1 |
| CHCHD4 | Up | coiled-coil-helix-coiled-coil-helix domain containing 4 |
| CHSY1 | Down | chondroitin sulfate synthase 1 |
| CHTOP | Down | chromatin target of PRMT1 |
| CIC | Down | capicua transcriptional repressor |
| CISH | Down | cytokine inducible SH2-containing protein |
| CLIC1 | Up | chloride intracellular channel 1 |
| COL18A1 | Down | collagen, type XVIII, alpha 1 |
| COPE | Up | coatomer protein complex, subunit epsilon |
| CORO1B | Up | coronin, actin binding protein, 1B |
| CRADD | Up | CASP2 and RIPK1 domain containing adaptor with |
| | | death domain |
| CREB3L4 | Down | cAMP responsive element binding protein 3-like 4 |
| CRTC2 | Down | CREB regulated transcription coactivator 2 |
| CSK | Up | c-src tyrosine kinase |
| CTNNBL1 | Up | catenin, beta like 1 |
| CTNND2 | Up | catenin (cadherin-associated protein), delta 2 |
| CYB5D1 | Down | cytochrome b5 domain containing 1 |
| DCAF10 | Down | DDB1 and CUL4 associated factor 10 |
| DDX49 | Up | DEAD (Asp-Glu-Ala-Asp) box polypeptide 49 |
| DEGS2 | Down | delta(4)-desaturase, sphingolipid 2 |
| DHRS3 | Up | dehydrogenase/reductase (SDR family) member 3 |
| DPAGT1 | Down | dolichyl-phosphate (UDP-N-acetylglucosamine) N- |
| | | acetylglucosaminephosphotransferase 1 (GlcNAc-1-P |
| | | transferase) |
| DVL3 | Up | dishevelled segment polarity protein 3 |
| E2F1 | Up | E2F transcription factor 1 |
| EFNA1 | Down | ephrin-A1 |
| EHF | Down | ets homologous factor |
| EIF3B | Up | eukaryotic translation initiation factor 3, subunit B |
| ELK1 | Up | ELK1, member of ETS oncogene family |
| ERCC1 | Down | excision repair cross-complementing rodent repair |
| | | deficiency, complementation group 1 (includes |
| | | overlapping antisense sequence) |
| ESR1 | Down | estrogen receptor 1 |
| ESRP2 | Up | epithelial splicing regulatory protein 2 |
| ETNK2 | Up | ethanolamine kinase 2 |
| FAM104A | Up | family with sequence similarity 104, member A |
| FAM114A1 | Down | family with sequence similarity 114, member A1 |
| FAM120A | Down | family with sequence similarity 120A |
| FAM126A | Down | family with sequence similarity 126, member A |
| FKBP4 | Up | FK506 binding protein 4, 59 kDa |
| FLT4 | Down | fms-related tyrosine kinase 4 |
| FOS | Down | FBJ murine osteosarcoma viral oncogene homolog |
| FUK | Up | fucokinase |
| GANC | Up | glucosidase, alpha; neutral C |
| GAPDH | Up | glyceraldehyde-3-phosphate dehydrogenase |
| GCET2 | Up | germinal center expressed transcript 2 |
| GGPS1 | Down | geranylgeranyl diphosphate synthase 1 |
| GNG7 | Down | guanine nucleotide binding protein (G protein), gamma 7 |
| H2AFJ | Up | H2A histone family, member J |
| H3F3B | Up | H3 histone, family 3B (H3.3B) |
| H3F3C, | Up | H3 histone, family 3C (H3.3C) |
| H3F3B | | H3 histone, family 3B (H3.3B) |
| HDAC11 | Up | histone deacetylase 11 |
| HIGD2A | Up | HIG1 hypoxia inducible domain family, member 2A |
| HIST1H2AG | Up | histone cluster 1, H2ag |
| HIST1H2BK | Up | histone cluster 1, H2bk |
| HIST1H3B | Up | histone cluster 1, H3b |
| HIST1H4I | Up | histone cluster 1, H4i |
| HMBOX1 | Down | homeobox containing 1 |
| HMG20B | Up | high mobility group 20B |
| HNRNPA2B1 | Down | heterogeneous nuclear ribonucleoprotein A2/B1 |
| HR | Up | hair growth associated |
| HSP90AB1 | Up | heat shock protein 90 kDa alpha (cytosolic), class B |
| | | member 1 |
| HSPB8 | Up | heat shock 22 kDa protein 8 |
| ICAM3 | Up | intercellular adhesion molecule 3 |
| IDH3A | Up | isocitrate dehydrogenase 3 (NAD+) alpha |
| IGFBP4 | Down | insulin-like growth factor binding protein 4 |
| ITPR1 | Down | inositol 1,4,5-trisphosphate receptor, type 1 |
| ITPRIPL2 | Down | inositol 1,4,5-trisphosphate receptor interacting protein- |
| | | like 2 |
| KDM4B | Down | lysine (K)-specific demethylase 4B |
| KIAA0430 | Down | KIAA0430 |
| KIAA1737 | Down | KIAA1737 |
| KRT8 | Up | keratin 8 |
| LAPTM4B | Up | lysosomal protein transmembrane 4 beta |
| LEF1 | Down | lymphoid enhancer-binding factor 1 |
| LETM1 | Up | leucine zipper-EF-hand containing transmembrane |
| | | protein 1 |
| LGALS2 | Up | lectin, galactoside-binding, soluble, 2 |
| LIN37 | Up | lin-37 homolog (C. elegans) |
| LYST | Down | lysosomal trafficking regulator |
| MAFG | Up | v-maf avian musculoaponeurotic fibrosarcoma oncogene |
| | | homolog G |
| MAN2C1 | Down | mannosidase, alpha, class 2C, member 1 |
| MANEAL | Up | mannosidase, endo-alpha-like |
| MAPK13 | Up | mitogen-activated protein kinase 13 |
| MAPT | Down | microtubule-associated protein tau |
| MDH1 | Up | malate dehydrogenase 1, NAD (soluble) |
| MDM2 | Up | MDM2 oncogene, E3 ubiquitin protein ligase |
| MFAP3L | Up | microfibrillar-associated protein 3-like |
| MMP25 | Up | matrix metallopeptidase 25 |
| MOCS2 | Up | molybdenum cofactor synthesis 2 |
| MRPS14 | Down | mitochondrial ribosomal protein S14 |
| MST1P9 | Down | macrophage stimulating 1 (hepatocyte growth factor- |
| | | like) pseudogene 9 |
| MYBL2 | Up | v-myb avian myeloblastosis viral oncogene homolog-like 2 |
| MYO5C | Down | myosin V-C |
| NDUFAF3 | Up | NADH dehydrogenase (ubiquinone) complex I, assembly |
| | | factor 3 |
| NDUFB9 | Up | NADH dehydrogenase (ubiquinone) 1 beta subcomplex, |
| | | 9, 22 kDa |
| NDUFS8 | Up | NADH dehydrogenase (ubiquinone) Fe—S protein 8, |
| | | 23 kDa (NADH-coenzyme Q reductase) |
| NKAIN1 | Up | Na+/K+ transporting ATPase interacting 1 |
| NPB | Up | neuropeptide B |
| NUF2 | Up | NUF2, NDC80 kinetochore complex component |
| OLFML2A | Down | olfactomedin-like 2A |
| PALLD | Down | palladin, cytoskeletal associated protein |
| PAN2 | Up | PAN2 poly(A) specific ribonuclease subunit homolog |
| | | (S. cerevisiae) |
| PARP6 | Down | poly (ADP-ribose) polymerase family, member 6 |
| PBXIP1 | Down | pre-B-cell leukemia homeobox interacting protein 1 |
| PCYT2 | Up | phosphate cytidylyltransferase 2, ethanolamine |
| PDCD6IP | Down | programmed cell death 6 interacting protein |
| PDCL3 | Up | phosducin-like 3 |
| PDF | Up | peptide deformylase (mitochondrial) |
| PDZK1 | Down | PDZ domain containing 1 |
| PFKFB3 | Down | 6-phosphofructo-2-kinase/fructose-2,6-biphosphatase 3 |
| PGR | Down | progesterone receptor |
| PHB | Up | prohibitin |
| PIN1 | Up | peptidylprolyl cis/trans isomerase, NIMA-interacting 1 |
| PIP | Down | prolactin-induced protein |
| PLA2G15 | Up | phospholipase A2, group XV |
| POGK | Down | pogo transposable element with KRAB domain |
| POLK | Down | polymerase (DNA directed) kappa |
| PPFIA1 | Up | protein tyrosine phosphatase, receptor type, f |
| | | polypeptide (PTPRF), interacting protein (liprin), alpha 1 |
| PPP1R12B | Down | protein phosphatase 1, regulatory subunit 12B |
| PRDX1 | Up | peroxiredoxin 1 |
| PSENEN | Up | presenilin enhancer gamma secretase subunit |
| PSMD5 | Down | proteasome (prosome, macropain) 26S subunit, non- |
| | | ATPase, 5 |
| PTPN6 | Up | protein tyrosine phosphatase, non-receptor type 6 |
| QSOX1 | Down | quiescin Q6 sulfhydryl oxidase 1 |
| RAB11FIP1 | Up | RAB11 family interacting protein 1 (class I) |
| RAB13 | Down | RAB13, member RAS oncogene family |
| RAB7L1 | Up | RAB7, member RAS oncogene family-like 1 |
| RALGPS2 | Down | Ral GEF with PH domain and SH3 binding motif 2 |
| RARA | Up | retinoic acid receptor, alpha |
| RCC1 | Up | regulator of chromosome condensation 1 |
| RGS19 | Up | regulator of G-protein signaling 19 |
| RNASEH2C | Up | ribonuclease H2, subunit C |
| RPL12 | Down | ribosomal protein L12 |
| RPL14 | Down | ribosomal protein L14 |
| RPL3 | Down | ribosomal protein L3 |
| RPLP0P6 | Up | ribosomal protein, large, P0 pseudogene 6 |
| RPS6KB2 | Up | ribosomal protein S6 kinase, 70 kDa, polypeptide 2 |
| RRNAD1 | Down | ribosomal RNA adenine dimethylase domain containing 1 |
| S100A6 | Up | S100 calcium binding protein A6 |
| SCGB2A2 | Down | secretoglobin, family 2A, member 2 |
| SCNN1A | Down | sodium channel, non-voltage-gated 1 alpha subunit |
| SDHB | Up | succinate dehydrogenase complex, subunit B, iron |
| | | sulfur (Ip) |
| SEC11C | Up | SEC11 homolog C (S. cerevisiae) |
| SELL | Up | selectin L |
| SEPT8 | Down | septin 8 |
| SH2B1 | Down | SH2B adaptor protein 1 |
| SIRT7 | Up | sirtuin 7 |
| SLC25A1 | Up | solute carrier family 25 (mitochondrial carrier; citrate |
| | | transporter), member 1 |
| SLC25A19 | Up | solute carrier family 25 (mitochondrial thiamine |
| | | pyrophosphate carrier), member 19 |
| SLC35E2B | Down | solute carrier family 35, member E2B |
| SLC38A1 | Up | solute carrier family 38, member 1 |
| SLC3A2 | Up | solute carrier family 3 (amino acid transporter heavy |
| | | chain), member 2 |
| SLC40A1 | Down | solute carrier family 40 (iron-regulated transporter), |
| | | member 1 |
| SLC4A2 | Up | solute carrier family 4 (anion exchanger), member 2 |
| SLC9A3R1 | Up | solute carrier family 9, subfamily A (NHE3, cation |
| | | proton antiporter 3), member 3 regulator 1 |
| SMARCC2 | Down | SWI/SNF related, matrix associated, actin dependent |
| | | regulator of chromatin, subfamily c, member 2 |
| SPAG9 | Up | sperm associated antigen 9 |
| SRRM2 | Down | serine/arginine repetitive matrix 2 |
| SSH3 | Down | slingshot protein phosphatase 3 |
| SSPN | Down | sarcospan |
| SSR3 | Up | signal sequence receptor, gamma (translocon-associated |
| | | protein gamma) |
| ST3GAL4 | Up | ST3 beta-galactoside alpha-2,3-sialyltransferase 4 |
| SUFU | Up | suppressor of fused homolog (Drosophila) |
| SYT5 | Up | synaptotagmin V |
| TARBP1 | Down | TAR (HIV-1) RNA binding protein 1 |
| TCEB2 | Up | transcription elongation factor B (SIII), polypeptide 2 |
| | | (18 kDa, elongin B) |
| TEX2 | Up | testis expressed 2 |
| TFPT | Up | TCF3 (E2A) fusion partner (in childhood Leukemia) |
| TGIF2 | Up | TGFB-induced factor homeobox 2 |
| THAP11 | Up | THAP domain containing 11 |
| THSD4 | Down | thrombospondin, type I, domain containing 4 |
| TIMP2 | Down | TIMP metallopeptidase inhibitor 2 |
| TMEM170A | Up | transmembrane protein 170A |
| TMEM63C | Down | transmembrane protein 63C |
| TOM1L1 | Up | target of myb1 (chicken)-like 1 |
| TOR1AIP1 | Down | torsin A interacting protein 1 |
| TRAPPC3 | Up | trafficking protein particle complex 3 |
| TRAPPC8 | Down | trafficking protein particle complex 8 |
| TRIM25 | Up | tripartite motif containing 25 |
| TRUB2 | Up | TruB pseudouridine (psi) synthase family member 2 |
| TSKU | Up | tsukushi, small leucine rich proteoglycan |
| TUBA1A | Up | tubulin, alpha 1a |
| TUBA1C | Up | tubulin, alpha 1c |
| TUBA1C, | Up | tubulin, alpha 1c |
| TUBA1A | | tubulin, alpha 1a |
| TXNRD1 | Up | thioredoxin reductase 1 |
| UFD1L | Up | ubiquitin fusion degradation 1 like (yeast) |
| USP5 | Up | ubiquitin specific peptidase 5 (isopeptidase T) |
| UXT | Up | ubiquitously-expressed, prefoldin-like chaperone |
| WBP11 | Up | WW domain binding protein 11 |
| WDR6 | Down | WD repeat domain 6 |
| WWC3 | Down | WWC family member 3 |
| WWP1 | Up | WW domain containing E3 ubiquitin protein ligase 1 |
| XPC | Down | xeroderma pigmentosum, complementation group C |
| ZFP106 | Down | zinc finger protein 106 |
| ZNF302 | Down | zinc finger protein 302 |
| ZNF608 | Down | zinc finger protein 608 |

TABLE 1B

| Probe set | Gene | Z-score | Affymetrix probe set sequences |
|---|---|---|---|
| 229819_at | A1BG | 0.382021523 | CCAACTACAGCTGCGTCTACGTGGA |
| | | | GCTGCGTCTACGTGGACCTAAAGCC |
| | | | TACGTGGACCTAAAGCCACCTTTCG |
| | | | GCTGCGCGAGGGCGAGACGAAGGCC |
| | | | CGAAGGCCGTGAAGACGGTCCGCAC |
| | | | CGAACCTCGAGCTGATCTTCGTGGG |
| | | | CACGCCGGCAACTACAGGTGCCGCT |
| | | | CACACCTTCGAATCGGAGCTCAGCG |
| | | | CTGTGGAGCTCCTGGTGGCAGAAAG |
| | | | GTGCTGTTGGTGTCCTCAGAAGTGC |
| | | | AAGTGCCGGGGATTCTGGACTGGCT |
| 206527_at | ABAT | −0.51888386 | GGATGACCCAGCAGACGTGATGACC |
| | | | AGGAGTTCAGGCCTAATGCTCCCTA |
| | | | CTACCGGATCTTCAACACGTGGCTG |
| | | | CCGTCCAAGAACCTGTTGCTGGCTG |
| | | | GCTGGCTGAGGTCATCAACATCATC |
| | | | TGAGAGGACGAGGCACCTTTTGCTC |
| | | | TCCTTCGATACTCCCGATGATTCCA |
| | | | TGACAAATCCATTCGTTTCCGTCCC |
| | | | CGTCCCACGCTGGTGTTCAGGGATC |
| | | | AAGAAGCCATTTCCACTACAGTGAG |
| | | | ACAGTGAGAAAGCCCGGATCCCAAC |
| 209459_s_at | ABAT | −0.68458777 | TAATGTATCTACATACCTACACCTA |
| | | | ATCTACATACCTACACCTATCTATA |
| | | | ACACCTATCTATATATAAGCTCATG |
| | | | GAAAACCATAGCTAAGTAGCATCGC |
| | | | GTAGCATCGCAGACTTAAGCGTACA |
| | | | AAGCGTACAAAGTGATCTTGTTCAC |
| | | | TCTTGTTCACAAGTAATCTGTTGAC |
| | | | ATCTGTTGACAGTGCCAATAAATGA |
| | | | CATGTCACAATGTAACGGATGACCA |
| | | | CGGATGACCATATGCACAATTCCAT |
| | | | CCTGTGTTAGTCAGTATTCTTAAAT |
| 209460_at | ABAT | −0.72504225 | AGAATTCTCAGCAGAGCTCAAGATT |
| | | | GATTGTAGAAACTCAGCAGAAGCTG |
| | | | GCTGGTAAAAACATGGGGAGCCCGG |
| | | | CTTCCGTGGCCGACAGTCTGGAAAT |
| | | | TGGCCGACAGTCTGGAAATGAATCC |
| | | | GAATCCATCATACATTAGTGCCATA |
| | | | GTGCCATAGAGTTTAGTAACCGTCC |
| | | | TAGTAACCGTCCAGCAAGTGTCATC |
| | | | AACCGTCCAGCAAGTGTCATCACTT |
| | | | AACAAGGTCCAGTAATAGCAAGTCT |
| | | | GTCCAGTAATAGCAAGTCTTAGTAC |
| 236664_at | AKT2 | 0.356840165 | AGGAAATTCACCCGAGGTCGCAGGG |
| | | | GGCCTTGAGTACTCATTTTGGTGCT |
| | | | ATTTTGGTGCTGATTACCTCTCTGC |
| | | | TAAATTGGTAGTTTCCTGCTCTTTT |
| | | | TTTCCTGCTCTTTTTGTGTAATCTT |
| | | | TAATGTGAAGCCTCTGGGGGCTGCC |
| | | | TGCCCTCGTGCACTGATGGTTGTGT |
| | | | GGCAGTGCGATTCCCTTTTAGCTGC |
| | | | TTAGCTGCTGCATGGGGGGAACTCA |
| | | | TTCCATGGGGTAGACCCCTCAACCG |
| | | | TTGACTTGGTTTCGTTTGGTGCTAC |
| 205640_at | ALDH3B1 | 0.505744977 | AAAACCTCCTGGGACTGTTGCAAGG |
| | | | GGGATTGAGGGATTGCTGAGCTGGA |
| | | | TTCTCAGTGGGGTGGCACGGAGCGG |
| | | | GGCAGGTGGGGCTGTGGTTATGCGA |
| | | | GGTTATGCGATAGGGTCTCCCTTCC |
| | | | TGTAACTCTTTATCCTCATGGTGCC |
| | | | TGCCCACTACGAGTCATACTCTTCC |
| | | | GCCAAAGCAGAATGCAGGGTTTCCT |
| | | | GCGGGGGTGCTTGAGAAACCTACAT |
| | | | TATCAACCTACAACTTTAGTCGGGA |
| | | | CAGGGGTGGACCTGAGTTTCGTCTC |
| 202204_s_at | AMFR | 0.3946814 | AATGCAGGTGTCCTGAGCACCACAC |
| | | | GTGGGGGAGGCGCACAGTGTGAGCC |
| | | | CCACGTCGTGGGGTAACATCTGTTA |
| | | | GAACTCTTGGTTCGATACCTGGAGC |
| | | | GGTGTGATGAAGTCACCCCTTTCTG |
| | | | CCTTTCTGTCCCACTACATCTGGGA |
| | | | TACATCTGGGACTGACTTTCCGAGC |
| | | | CAGTCCAAAGCCGGCTTGATTTCCG |
| | | | TTGATTTCCGTGAACTCTGGTGCTC |
| | | | TGCTCCTGCATCTCATGAGTGTGCC |
| | | | GCCTGTGGGTTTGGTCCTTGAACAA |
| 205706_s_at | ANKRD26 | −0.50628649 | GAGAGGCTAGCAGAGGTCAACACCA |
| | | | AGAGCAGATCTTTGTTCACCACTCT |
| | | | CAGTCATGGAGCCACCTTGTGTGGG |
| | | | GAAAACTTAGTGATCTCTACCTCAA |
| | | | TACCTCAAATCCACGGGCTTCAAAT |
| | | | GAACTACTTGAGCAAGATGCAGCAG |
| | | | ACTAGAGAACTCAAAGAAGCTGCTG |
| | | | GAATCTGGATCAATAGCTTCCCCTC |
| | | | TTCCCCTCTAGGGTCTACTGATGAG |
| | | | GGGTCTACTGATGAGTCAAATCTAA |
| | | | TTTATTACTGGGCTGTTTATGTGAC |
| 202120_x_at | AP2S1 | 0.489068174 | ACTTTAAGATCATTTACCGCCGCTA |
| | | | ACAAACTGGCTTACCTGGAGGGCAT |
| | | | GGAGGGCATTCACAACTTCGTGGAG |
| | | | TGGACCTGGTGTTCAACTTCTACAA |
| | | | GGTCGTGGACGAGATGTTCCTGGCT |
| | | | GAAATCCGAGAGACCAGCCAGACGA |
| | | | AAACAGCTGCTGATGCTACAGTCCC |
| | | | TCCTTCCCTCAACTGCCTAGGAGGA |
| | | | GAAGGGACCCAGCTGGGTCTGGGCC |
| | | | CAAGGGAGGAGACTTCACCCCACTT |
| | | | GCCGTTGTCGTGTGATTCCATAAGC |
| 208074_s_at | AP2S1 | 0.499416201 | ATCCAGAACCGGGCAGGCAAGACGC |
| | | | GCGCCTGGCCAAGTGGTACATGCAG |
| | | | GCCAAGTGGTACATGCAGTTTGATG |
| | | | GATCGAGGAGGTGCATGCCGTGGTC |
| | | | GACGCCAAACACACCAACTTTGTGG |
| | | | AAACGAATATTTCCACAATGTCTGT |
| | | | CAATGTCTGTGAACTGGACCTGGTG |
| | | | GACCTGGTGTTCAACTTCTACAAGG |
| | | | TCTACAAGGTTTACACGGTCGTGGA |
| | | | CTGATGCTACAGTCCCTGGAGTGAG |
| | | | GTCCCTGGAGTGAGGGCAGGCGAGC |
| 211047_x_at | AP2S1 | 0.453831888 | ACTTTAAGATCATTTACCGCCGCTA |
| | | | ATGACAACAACCTGGCTTACCTGGA |
| | | | GAGGCCATTCACAACTTCGTGGAGG |
| | | | TGGACCTGGTGTTCAACTTCTACAA |
| | | | GGTCGTGGACGAGATGTTCCTGGCT |
| | | | GAAATCCGAGAGACCAGCCAGACGA |
| | | | AAACAGCTGCTGATGCTACAGTCCC |
| | | | TGGAGTGAGGGCAGGCGAGCCCCAC |
| | | | ACAAGGGAGGAGACTGCACCCCACT |
| | | | GCCGTTGTCGTGTGATGCCATAAGC |
| | | | CTGTGCGTGGAGTCCCCAATAAACC |
| 202045_s_at | ARHGAP35 | −0.47676853 | TGCTGCGACCCAGATTCTTCTGCAG |
| | | | AGGATGTGTCTGTCTTTGTCACGGT |
| | | | GGGTGACATCATAGGAGCAGCTCGC |
| | | | CAGCTCGCTGGCCAGAAGGGGATGG |
| | | | CACACAAAACTTCACAGCAGGCCAG |
| | | | AGCAGGCCAGCTGCAGTGACTTGTC |
| | | | TAGGGTGCGGTGGCCAGGAGGGCCC |
| | | | TCGCTGCTTTCCCGAGGGCAGCGCA |
| | | | GCAGGGATCCGGGGAAGCTGCGGCA |
| | | | CGGCTTCGTGGCTCTGAGGTGTAAC |
| | | | CGGAGGACATCGTCTGTGTCCAGGT |
| 229394_s_at | ARHGAP35 | −0.75549803 | GTGTTAGTAGTCTGGCTGTGTGCCC |
| | | | CTGTGTGCCCAAAATTCTGTTTCGC |
| | | | GTGCCCAAAATTCTGTTTCGCAGCA |
| | | | GTTTCGCAGCAAAAGTGAAGACCTG |
| | | | TGGGTTTTTTGAGGCTCCAACCTGA |
| | | | GGCTCCAACCTGATTAGTGCATGGT |
| | | | CAATGAAGGCTGAGGCATCTCTGAC |
| | | | GGCATCTCTGACTGAGGTGTTTTTG |
| | | | GTACTTGTCTCAATGGGAATGGTGT |
| | | | AAAAGGCCTTATGTGATCTGTATCA |
| | | | GAAAATTTGGAATAGTGCTGCTGCC |
| 209985_s_at | ASCL1 | 0.407298116 | GCCACGGCTGGAGAGACCGAGACCC |
| | | | GAGACCCGGCGCAAGAGAGCGCAGC |
| | | | GAGAGCGCAGCCTTAGTAGGAGAGG |
| | | | GTAGGAGAGGAACGCGAGACGCGGC |
| | | | GAGACGCGGCAGAGCGCGTTCAGCA |
| | | | GCGCGTTCAGCACTGACTTTTGCTG |
| | | | AAACAAGAAGGCGCCAGCGGCAGCC |
| | | | GAAGCCAACCCGCGAAGGGAGGAGG |
| | | | TTTTTTTGCTCCCACTCTAAGAAGT |
| | | | TCCCACTCTAAGAAGTCTCCCGGGG |
| | | | GTCTCCCGGGGATTTTGTATATATT |
| 209987_s_at | ASCL1 | 0.658405716 | GGACGAGCATGACGCGGTGAGCGCC |
| | | | ACTACTCCAACGACTTGAACTCCAT |
| | | | TCGTCGGACGAGGGCTCTTACGACC |
| | | | TTCTCGACTTCACCAACTGGTTCTG |
| | | | GCCCTGGTGCGAATGGACTTTGGAA |
| | | | CAGGGTGATCGCACAACCTGCATCT |
| | | | ACCTGCATCTTTAGTGCTTTCTTGT |
| | | | TTCGCCCGAACTGATGCGCTGCAAA |
| | | | CAACTTCAGCGGCTTTGGCTACAGC |
| | | | AGCGCAACCGCGTCAAGTTGGTCAA |
| | | | CAAGTTGGTCAACCTGGGCTTTGCC |
| 209988_s_at | ASCL1 | 0.632471336 | GTATCTATCCTAACCAGTTCGGGGA |
| | | | CATGTAATGCTATTACCTCTGCATA |
| | | | GATGTGTAGTTCACCTTACAACTGC |
| | | | ACCTTACAACTGCAATTTTCCCTAT |
| | | | GCAATTTTCCCTATGTGGTTTTGTA |
| | | | TGTAAAGAACTCTCCTCATAGGTGA |
| | | | GAGATCAAGAGGCCACCAGTTGTAC |
| | | | CACCAGTTGTACTTCAGCACCAATG |
| | | | AGCACCAATGTGTCTTACTTTATAG |
| | | | ATGCAGCTACTGTCCAAACTCAAAG |
| | | | GCAGCCAGTTGGTTTTGATAGGTTG |
| 213768_s_at | ASCL1 | 0.522864871 | GAAGGGAGCAGCACACGCGTTATAG |
| | | | CGCGTTATAGTAACTCCCATCACCT |
| | | | CACCTCTAACACGCACAGCTGAAAG |
| | | | CGCCCTTTCTTAGAGTGCAGTTCTT |
| | | | CCCACCCCAATAAGCTGTAGACATT |
| | | | TGCTATTCTCAGCCCTTTGAAACTC |
| | | | AACCCCATCGCCAACTAAGCGAGGC |
| | | | GAAGCGCTCAGAACAGTATCTTTGC |
| | | | GTATCTTTGCACTCCAATCATTCAC |
| | | | GCAACTGGGACCTGAGTCAATGCGC |
| | | | TGCAAAAGCAGTGGGCTCCTGGCAG |
| 244519_at | ASXL1 | 0.402859825 | TTAGAAAACTACTCGGATGCTCCAA |
| | | | CTACTCGGATGCTCCAATGACACCA |
| | | | CAATGACACCAAAACAGATTCTGCA |
| | | | TCTCGCATGCCTCAATGCTATGCTA |
| | | | CGCATGCCTCAATGCTATGCTACAT |
| | | | GCCTCAATGCTATGCTACATTCCAA |
| | | | CAATGCTATGCTACATTCCAATTCA |
| | | | TGTTTTATAAACTGCCTGGCCGAAT |
| | | | ATAAACTGCCTGGCCGAATCAGCCT |
| | | | ATCAGCCTTTTCACGCTCAAGGTGT |
| | | | GCCTTTTCACGCTCAAGGTGTGAGC |
| 226684_at | ATG2B | −0.37898028 | TGTAAATGTCATCTCAGCTGGCTCA |
| | | | AGCTGGCTCAGTTATATCTCTAATG |
| | | | ATCTCTAATGTCCCGGGTAGCAGCA |
| | | | CAGCACCTCCCTCTAAAAATATGTT |
| | | | AATATGTTTACTTCGCTGTTTCACT |
| | | | AAATGGCAGCTTCCGATTTCTAGTT |
| | | | TGGTCACCCAGGGCTATTTGCTTTT |
| | | | AGGGGTGTCTAGTTCAGCTTTTATG |
| | | | GTTGATCCATCCTGACTTATTTTAG |
| | | | GACATTGAATTTATCTCACCACAAG |
| | | | GACTGTCTTTGCTAAGTTTCCTAAT |
| 40489_at | ATN1 | −0.45511501 | AAGCGACAAGCCACTGTAGAACCTG |
| | | | AAGCCACTGTAGAACCTGCGATCAA |
| | | | CACTGTAGAACCTGCGATCAAGAGA |
| | | | GTAGAACCTGCGATCAAGAGAGCAC |
| | | | GAACCTGCGATCAAGAGAGCACCAT |
| | | | AGCCAAGAGGGTGCTGCTCAGTTGC |
| | | | CCAAGAGGGTGCTGCTCAGTTGCAG |
| | | | GGTGCTGCTCAGTTGCAGGGCCTCC |
| | | | GCTGCTCAGTTGCAGGGCCTCCGCA |
| | | | CTGCTCAGTTGCAGGGCCTCCGCAG |
| | | | AGTTGCAGGGCCTCCGCAGCTGGAC |
| | | | CAGGGCCTCCGCAGCTGGACAGAGA |
| | | | ACAGAAAGCGCACAGAATCTTGGAC |
| | | | CTTGGACCAGGTCTCTCTTCCTTGT |
| | | | TGGACCAGGTCTCTCTTCCTTGTCC |
| | | | CTGCCCCGTTGGTGTGATTATTTCA |
| 201242_s_at | ATP1B1 | −0.638675 | AGAGCTGATCACAAGCACAAATCTT |
| | | | TGATCACAAGCACAAATCTTTCCCA |
| | | | CTTTCCCACTAGCCATTTAATAAGT |
| | | | AACCTACTAGTCTTGAACAAACTGT |
| | | | AACTGTCATACGTATGGGACCTACA |
| | | | GTATGGGACCTACACTTAATCTATA |
| | | | GGACCTACACTTAATCTATATGCTT |
| | | | ACACTTAATCTATATGCTTTACACT |
| | | | ATATGCTTTACACTAGCTTTCTGCA |
| | | | GCTTTACACTAGCTTTCTGCATTTA |
| | | | GCTTTCTGCATTTAATAGGTTAGAA |
| 201243_s_at | ATP1B1 | −0.70700285 | GGTGATGGGTTGTGTTATGCTTGTA |
| | | | GTTATGCTTGTATTGAATGCTGTCT |
| | | | GAATGCTGTCTTGACATCTCTTGCC |
| | | | CTTGTCCTCCGGTATGTTCTAAAGC |
| | | | TCCGGTATGTTCTAAAGCTGTGTCT |
| | | | AAGCTGTGTCTGAGATCTGGATCTG |
| | | | TCTGAGATCTGGATCTGCCCATCAC |
| | | | GAGGCATCACATGCTGGTGCTGTGT |
| | | | GGTGCTGTGTCTTTATGAATGTTTT |
| | | | GACTGGTGTTAAATGTTGTCTACAG |
| | | | GATCTTGTATTCAGTCAGGTTAAAA |
| 236534_at | BNIPL | −0.65529039 | ACTTTAGCTGTAGAACCTTGGGCAA |
| | | | AACTGGAGGGACTGTGATCCTTCCA |
| | | | GAAGAGGCTTACCTGACAGCCAGCC |
| | | | GAGTCAGCTCATTAAATCTTGAAGA |
| | | | TTTCCTTCTAAGTCATGTCTGCTGC |
| | | | TCTAAGTCATGTCTGCTGCCTGTGA |
| | | | TGCTGCCTGTGAGCCTGGGAAGGAG |
| | | | GAGCCTGGGAAGGAGTGCTTTCAAA |
| | | | GAGTGCTTTCAAAACCTGTATTTTT |
| | | | GCTCGGCCAGAGCTCTGGGTTTTAA |
| | | | CTGGGTTTTAATCCTACTTTAGCTG |
| 218954_s_at | BRF2 | 0.541780241 | GGAGACCCGAGAGAAGGAGCCACCG |
| | | | TCTTGCCACCCTGCATGTTGAAGTC |
| | | | TTGAAGTCCCCGAAGCGGATCTGCC |
| | | | TAGAACAGTATTTGCGTACCCCTCA |
| | | | TTTGCGTACCCCTCAGGAAGTTAGG |
| | | | TAGGGACTTTCAGAGAGCCCAGGCT |
| | | | GATATCCACTGGGAGCACTTCATCC |
| | | | TGTGCTGCTGCGGATGGCTGAGCAG |
| | | | CTGGCCTGGTTACGAGTTCTGAGAC |
| | | | GACTTGACAAACGGTCTGTGGTGAA |
| | | | GTGAAGCACATCGGTGACCTTCTCC |
| 218955_at | BRF2 | 0.673065335 | AGGAACCAAGAGGGGCTCTGCCATT |
| | | | CTCTGCCATTAGTTGGACCCTGGGT |
| | | | GACCCTGGGTCCTGGAGTAAAGTCA |
| | | | GAGATTCCCATCCCTTGGTGTGGGA |
| | | | AGAGCAAGTTGCCTATGTCCATGTT |
| | | | GTTCTGTGAGATGGCTTTCCTCATA |
| | | | GGCTCTTTGCTGCTGGTTTGAATTG |
| | | | GGTTTGAATTGGACACACTGCTGCG |
| | | | CTTCCCTCTGCTTGTGGAGTGGTTG |
| | | | GAACTGGGGAATTCTGGCCCTACGT |
| | | | TATGGTGTCATGAGATCCTCTACCT |
| 203755_at | BUB1B | 1.065024239 | TTCTTTGTGCGGATTCTGAATGCCA |
| | | | TGGGGTTTTTGACACTACATTCCAA |
| | | | GTTAACTAGTCCTGGGGCTTTGCTC |
| | | | GGGGCTTTGCTCTTTCAGTGAGCTA |
| | | | GAGCTAGGCAATCAAGTCTCACAGA |
| | | | GTCTCACAGATTGCTGCCTCAGAGC |
| | | | GGACACATTTAGATGCACTACCATT |
| | | | CACTACCATTGCTGTTCTACTTTTT |
| | | | GGTACAGGTATATTTTGACGTCACT |
| | | | GGCCTTGTCTAACTTTTGTGAAGAA |
| | | | GTTCTCTTATGATCACCATGTATTT |
| 229888_at | C120060 | 0.477972255 | TTCAAAAGTGCCCATACGCCAGTCA |
| | | | GCTAAACAGCAGTAACATCCTTGGG |
| | | | AACATCCTTGGGAGTCTGGAATCTT |
| | | | GAAATTCCCCATCATGAATCTTCAA |
| | | | AGAGCAATCAGATGTCACCACATCT |
| | | | ATCTGAGAGAACCAGAAGTCCTCCA |
| | | | AAAATCCCACAAAGTCAGCAGCAGA |
| | | | GGGACCAATCTTAGAGATCCTCCAA |
| | | | GAAAGCCAGTGACAAGTAGGGATGC |
| | | | GTTTCTAAGATCTTTTGGTGCCAAA |
| | | | GTCATCTGGCAAAACATTTACCTGT |
| 226901_at | C170058 | 0.409662665 | GTACATAACAGTAAGCGCACTAGTC |
| | | | ACAAGGGTCAAAGCCCAGGACAAGT |
| | | | AAGGGCCAGTGTGCAGATGGGTGGA |
| | | | GTACTAAAGGGCTTACTTCAGGCAA |
| | | | GGCAAAAGTGTTCCTGACGTACCAA |
| | | | CTCCCTGCTCCTAGTAATGTATGTT |
| | | | AATGTATGTTTTGTGCTGAACTGGC |
| | | | TGAACTGGCAGCTATCCCAATGTGA |
| | | | CAGACAATGATTTACACAGCTCAGA |
| | | | AGCTCAGATAATTGACCTGTCCAGT |
| | | | GTCCAGTTAACAGATCATTGCTTCA |
| 225823_at | C190070 | 0.42217782 | TCAAGGGAAGTGTGGCTGGGGGCGC |
| | | | CGCCGTCTACCTGGTGTACGACCAG |
| | | | CAGTTCAGCCAGTACGTGTGTCAGC |
| | | | ACGTGTGTCAGCAGACAGGCCTGCA |
| | | | CAAAGATTTACTTTCCCATCCGTGA |
| | | | GTGACTCCTGGAATGCAGGCATCAT |
| | | | TCATGACGGTGATGTCAGCTCTGTC |
| | | | GGGCTGGGAGTATGTGAAGGCGCGC |
| | | | GGCGCGCACCAAGTAGCGAGTCAGC |
| | | | GCCTGCCCCGGCCAGAACGGGCAGG |
| | | | GTGGTCGCTGATGAGGTTCCTCATC |
| 225480_at | C1orf122 | 0.598551981 | GAGGAGATGTTACGGCAGCTGGGCC |
| | | | AGGCGGCTTTCCAAAGGATGCTGGC |
| | | | GACTCTGAACAACTCCCTTCAGTAA |
| | | | CACTGGCAGTGGCTGGTACTTGGCT |
| | | | CTTGGCTCTCAGCCTGGAGTGGCAG |
| | | | AGCTCTGCTAGCAGCTGGGTTCACT |
| | | | AATGCAGCCAATGAATACCCAGTCT |
| | | | ATACCCAGTCTGATTACCCAGATTT |
| | | | AGCAGTGCTCGCCAGAGTGGTCTGG |
| | | | GTCTGGCCTGCTATGGGGGATCCAG |
| | | | GGATCCAGGTGGTGTTACATGTCCA |
| 223039_at | C22orf13 | 0.460898172 | GGGCTTTGTTCATTCTAGCCACGGG |
| | | | GTGCACATGCTGTTAGGGCTGTCAC |
| | | | GGGCTGTCACTAGGGAGTGGCCTTC |
| | | | GAGGGTGGTAACAGCACCTCAGTCC |
| | | | TTAGAAACACTCAGTCTCTGGTCCC |
| | | | TCTGGTCCCAGAGGATGGCTTCTCA |
| | | | TGGCTTCTCAGGGCATGCCACAAGT |
| | | | CATTCTCAAGACTCATCTGCCTAGG |
| | | | AGACACACTGTGTTGCATTCTTGCA |
| | | | ACAGCACATGACACCGACAGCTGCC |
| | | | CCAGCACAGCACCTGAAGCCATGTG |
| 204757_s_at | C2CD2L | −0.65986454 | TATATGTGTGGCTTAGGACCCTCCG |
| | | | GGACCCTCCGTGAACAGATGATAGA |
| | | | ATGATAGAGGGCATCTCTCCCAGGT |
| | | | CTTCTTTTCTGTCCCAGGAGGGTGG |
| | | | CCACTCAGACCAGCACCAGTGTCTG |
| | | | GAGAATGTTGGCAGCTCACAGAGAG |
| | | | TTACCGTTTTTTGTACTTGATGCCT |
| | | | TGTACTTGATGCCTTCTCTGTGAGC |
| | | | CTCTGTGAGCAGTGGCTCTGTGGGA |
| | | | TGATGGAGCCACGCAAGGCTGCACC |
| | | | ATTGCTGTGTGATGGCTTGGAATTT |
| 218187_s_at | C8orf33 | 0.611515101 | GATGCCTGTTGCAAAGTGGACCATG |
| | | | TGGACCATGGTCTAGCAGTAGCATC |
| | | | ATGGTCTAGCAGTAGCATCAGTGTC |
| | | | CTAGCAGTAGCATCAGTGTCAAGGA |
| | | | AACACCCACTACTTAGCAGACTGGG |
| | | | CCACTACTTAGCAGACTGGGAAAAG |
| | | | GAAAGTACTAAATGTCTGATATGCA |
| | | | GGACACATGACCCATGTGACCTTAC |
| | | | CACATGACCCATGTGACCTTACCTA |
| | | | CATGTGACCTTACCTATTATTGGAG |
| | | | ATTGGAGATGGTTCACATTCCTTAC |
| 222551_s_at | C8orf33 | 0.521449961 | GCTATTGGAGCAATCCGAACCCTGC |
| | | | TGCGCAGCAAAAGAACGCCCTTGCC |
| | | | TGGAAGCCGAATGGCGTGAGGCCCT |
| | | | CTGCTGCTTATTCAGCCCAGGTGCA |
| | | | GCAACCTGTAGATGGAGCCACCAGA |
| | | | AAGAGCCAAAGGGTCTGCAGGCCTC |
| | | | TGCAGGCCTCGCTCTATATGGAGAG |
| | | | GGGGTTTGTTTTGAGTGCAGAGCCT |
| | | | CCTTTCCAGGACTTCTGTTGTCAGA |
| | | | TCCCTGGCTGGTCCAAGGATTTGTA |
| | | | CAGATAGGCAAAAGACCCCGTTCGT |
| 231172_at | C9orf117 | −0.51594747 | AGCAGCCAATCGTGTTGCCAACTGT |
| | | | TGTTGCCAACTGTTTGGCGTCCACC |
| | | | GCCGCCATGCTTCTGAGGGGCGGAA |
| | | | TTCAGTAGCGCGGCGTCACAGTGTC |
| | | | GTCACAGTGTCCCTTCGGGACTTGT |
| | | | CCCTTCGGGACTTGTGTGGGACGCT |
| | | | GCTCCAAAACACATCGGCTCATGGC |
| | | | CTTCGGTTGGGAGGCCTTGTTATGC |
| | | | TATGGCCCTGACTTGCGGCGAAAAT |
| | | | GCGAAAATCTGGCAAGTCCTTTCCC |
| | | | CCTCTCCAGCTAATAAAAGTTTTCT |
| 221585_at | CACNG4 | 0.452208385 | CACTGCCATGACCAGGCCGAAGGCA |
| | | | GACCAGGCCGAAGGCAGGGAACGCC |
| | | | AAAGCAAGGCAGCCGTGCTGTTCTA |
| | | | CAAGGCAGCCGTGCTGTTCTAGTTC |
| | | | GCCCCAGAAGTTTCTATCATTCCAT |
| | | | GAAGTTTCTATCATTCCATGGAGAA |
| | | | GCTGTGTTCCAATGAATCCTACCTC |
| | | | TCTTGCCCAGTCCCAGGCAGAGTAA |
| | | | GCCCAGTCCCAGGCAGAGTAAGCAG |
| | | | GGCCCACCTAGGGACCAAGAAAGAG |
| | | | GAAGAAGGGGACGAGCCGGGAGCAA |
| 231737_at | CACNG4 | 0.56182315 | CTTTTTGTCACACAGGATGGCATGT |
| | | | GCATGTGATCCTCAAGACGACGAAC |
| | | | GCCGAGCTACAGGTACCGGCGACGG |
| | | | ACGTGTCGCCCATGGGCCTGAAGAT |
| | | | GCCTGAAGATCACAGGGGCCATCCC |
| | | | CCATGGGGGAGCTGTCCATGTACAC |
| | | | TCCATGTACACGCTGTCCAGGGAGC |
| | | | AGCTTCCTGCAGGTGCATGACTTTT |
| | | | GACTTTTTCCAGCAGGACCTGAAGG |
| | | | AAGGAAGGTTTCCACGTCAGCATGC |
| | | | TCAGCATGCTGAACCGACGGACGAC |
| 62987_r_at | CACNG4 | 0.398600737 | CCGGGCCTTCTCAGCCTTCTCCCCG |
| | | | GGGCCTTCTCAGCCTTCTCCCCGCG |
| | | | TCTCCCCGCGGCCAGCTGGGTCTCC |
| | | | GCGGCCAGCTGGGTCTCCGGGGACC |
| | | | GGCCAGCTGGGTCTCCGGGGACCCT |
| | | | GCCCTGGGCCGCCCATTCCTGGCCC |
| | | | TGGGCCGCCCATTCCTGGCCCTCCC |
| | | | CCCTCCCGCTGCATCTCAGACCTGA |
| | | | GCTGCATCTCAGACCTGACACCCAA |
| | | | TGCATCTCAGACCTGACACCCAACG |
| | | | GCATCTCAGACCTGACACCCAACGG |
| | | | TGGCCTGTGCCCACCTTCTCTCCCT |
| | | | CCTCCCTGGCCTCCAGAGGTGGCGT |
| | | | CCCCACCCCTGTGTGTTTCGCCAGT |
| | | | TACTGGTTTTGGGTTGGTTGTTCTG |
| | | | TGTGCTGGGAGACCGGACCCGGGGC |
| 201381_x_at | CACYBP | 0.669614252 | ATTAGTACCCTGGTCATTTTGTTCA |
| | | | GGGTTATATTGCATTCTCACGTGAA |
| | | | ATCTCTTGAAACCCATCTCTGTGGA |
| | | | AACCCATCTCTGTGGAAGGCAGTTC |
| | | | CAAGGTGGGATTACCTGACCCAGGT |
| | | | AAAGAGAAGCCCTCCTATGACACTG |
| | | | AGCCCTCCTATGACACTGAAACAGA |
| | | | GGAGACACGGAATTTTGAGACTTTA |
| | | | AAAGGCAATGAATTCTCCATTTCCT |
| | | | AAATATGCTTATTAAACACTCCTGC |
| | | | ACACTCCTGCAAAGATGGTTTTATT |
| 201382_at | CACYBP | 0.394076544 | TACTGAAACACATTATGCCTCTGTA |
| | | | ATGCCTCTGTAATTGGGGTTGACAC |
| | | | GGGGTTGACACATGAACAGAATAGC |
| | | | GAATAGCAGACACAATGCATATGAA |
| | | | TATAGATATATTCCAAGCCGCCTGA |
| | | | CAAGCCGCCTGACGATCTAATTGTA |
| | | | GACATTATATGTGACTTAAAACCTA |
| | | | ACTATTGATCAATTTTAACTACATA |
| | | | CCCACCATAACCCAAGGCAAACAAT |
| | | | AAACAATGTATTGACAGGATTCCAA |
| | | | CATGTAAAGATGCTCACCTTGTTCA |
| 210691_s_at | CACYBP | 0.67538078 | GAAGAGTTACTCCATGATTGTGAAC |
| | | | TGAACAATCTCTTGAAACCCATCTC |
| | | | ATCTCTGTGGAAGGCAGTTCAAAAA |
| | | | GACTGATACAGTTCTTATATTGTGT |
| | | | CAAGGTGGGATTACCTGACCCAGGT |
| | | | CTGACCCAGGTTGAAAAGGAGTGCA |
| | | | GAAACAGATCCTAGTGAGGGATTGA |
| | | | TGAAGCGAACCATTAATAAAGCCTG |
| | | | AAAGCCTGGGTGGAATCAAGAGAGA |
| | | | GTAAGGGAATATTGGTGAGCTGCAT |
| | | | AATTTGACAGATAGCTATTTACATA |
| 209002_s_at | CALCOCO1 | −0.66325252 | GCAGTGGCTGAATTTATCCCCTGAA |
| | | | GAGGCCTTCCCCTGTGGGAATAGAA |
| | | | TGGGAATAGAATCGTCCACTCCTAG |
| | | | AGCCCTGGTTGCTTCTGATACACAG |
| | | | TTCTGATACACAGCCACTGCACACA |
| | | | TACCCTCTCTTATTTGGAGTTTCCG |
| | | | TGGAGTTTCCGTTGGTTTACCTGAG |
| | | | TCTCTGGGGTCTGCACAGAGGCAGC |
| | | | CAGTTTCATTGGTTCCTCTTTCTGT |
| | | | GTGCCTTCTGTGAGGAATGGGGGGA |
| | | | GTCCCCCCACAGCAATAAAAGCTTC |
| 212551_at | CAP2 | −0.48832527 | AACTCGGCCTGGTGTTTGACAATGT |
| | | | GAAGTGATCAACTCCCAGGACATTC |
| | | | GGTTGCCACATATACCTCAGTGAAG |
| | | | AGATCGTGAGCGCCAAGTCATCTGA |
| | | | ATGAACATACTTATCCCTCAGGATG |
| | | | TTATGGCCTAACTTCCTGAGAGACC |
| | | | TGAATCCCCCTCTATCAAACAAACA |
| | | | GCCTCCAACGATTCTGTGCTATAGA |
| | | | AGATACAGCACTGTTTCTGGCACGC |
| | | | GCACGCCTCGTGGGCATTTTGAAAT |
| | | | TAACGTTTCCTCATGATTTGCCTTT |
| 212554_at | CAP2 | −0.50081085 | AATCAAGCTCAGTTATTATTTTCCA |
| | | | TTATGTCTTTAACGTTTTCTTATAG |
| | | | TTCTTATAGACTAATTTCCTCTTTT |
| | | | CTTGCTGCTCCTATTTTGTAGTCTT |
| | | | GATGCTTCTTCAGCGTAAGAGTAGC |
| | | | GAGTAGCTATGATATTCCTTTTTAT |
| | | | AAATCTGCAACTTCTTGGATCATAT |
| | | | GTATAATGCTTGCAGGCCCAGTACA |
| | | | ATATATTGTGCCTCTTACAGCCTTT |
| | | | GTGCCTCTTACAGCCTTTGGAATAC |
| | | | AATGCTCATGTACCAAGGTTTTGCT |
| 208683_at | CAPN2 | −0.93678657 | GACACGAGGCCCTTGGCAGGGAATA |
| | | | CAGTCCAAGATTACCATTTCCCATG |
| | | | TCACCTCTGTCGCTTGGGTTAAACA |
| | | | AATCGTTCTCCTTACAATCAAGTTC |
| | | | AATCAAGTTCTTGACCCTATTCGGC |
| | | | TTCGGCCTTATACATCTGGTCTTAC |
| | | | ATCCTGCGCTTGATCAACTGAACCA |
| | | | ATAAGCTGTTTGCCACCTCAAAACT |
| | | | TATGAACTTCACCACCACTAGTGTC |
| | | | ACCACTAGTGTCTGTCCATGGAGTT |
| | | | TGCCTTATCTTCTTCCAAATGTACT |
| 229030_at | CAPN8 | −0.79447996 | ACTGATTATAACCACTCGGGCACCA |
| | | | GATGCCCACGAGATGAGGACAGCCC |
| | | | ACAGCCAGGTGCAGCAGACCATTGC |
| | | | GCGGTATGCGTGCAGCAAGCTTGGC |
| | | | CATCAACTTTGACAGCTTCGTGGCT |
| | | | TCGTGGCTTGTATGATCCGCCTGGA |
| | | | CCTCTTCAAACTATTCAGCCTTCTG |
| | | | TGGTCTGACCCGGGGTTTCGGACAT |
| | | | GGTTTCGGACATCAGTGACACTCCC |
| | | | ACTGGTTGTTCATACCTTTCTTGCC |
| | | | CTTTCTTGCCCTGGGTCTATTTCAG |
| 203323_at | CAV2 | −0.57309235 | ATGAAGCTCATATCCTTTTGAAGGT |
| | | | GAGACATTTCAAAACTGCCCTAGGC |
| | | | CCTAGGCCATTGCAGCATCCTTAGA |
| | | | GATGGGACGCATAATCATTACCTTA |
| | | | ATTACCTTAAAGCATCACCACTCAT |
| | | | AAGCATCACCACTCATTTTGACCAT |
| | | | AAGGTCAATCAGCCTCATGACTTTA |
| | | | GCTATCCTTTCAAACAGCTATTGGC |
| | | | AAGTAACATGACTTCCTTATTTCTG |
| | | | AAATCCAGGCTTTATGTACAAACAT |
| | | | GATGAGCAGACTTCTCGGAATTCAT |
| 203324_s_at | CAV2 | −0.47190989 | AAAGCACACAACGATTATAGTAACT |
| | | | TCCTACAGGCCTATTTAACAAGATG |
| | | | AAATGTTGCTCTAATCAGATTGCTT |
| | | | ATGTAGCTCCCACAAGGTAAACTTC |
| | | | AAACTTCATTGGTAAGATTGCACTG |
| | | | GATTGCACTGTTCTGATTATGTAAG |
| | | | GTTGACACCACTTAGATTTAAAGGC |
| | | | AAGGCAGACAGTTTTGCTTTAGTAC |
| | | | TACCTTTACATATATAGTCACTGGC |
| | | | AGTCACTGGCATACTGAGAATATAC |
| | | | GAGAATATACAATGATCCTGGAAAT |
| 225644_at | CCDC117 | 0.4973068 | TTTGCCTTAAGAGTTCCCTAGGGAG |
| | | | TACCAGGGCTTTTCGTTTTGTGTAG |
| | | | GTAGCTTTTGCAGCATGGATCAAAC |
| | | | GGATCAAACATTGGCTTACTGTGCT |
| | | | ATTGGCTTACTGTGCTAATGTGTGA |
| | | | ATGTGTATTTTATCTGAGTTTGAGT |
| | | | GAGTAGGGTGCGTTGTGGATTTTGT |
| | | | GAAAGTCCAGTTCTCATAAATATTG |
| | | | GTTTATCAGCACGTTCATTTATTAT |
| | | | GGAATGTTCTGGAAGATGCTGTTAA |
| | | | TGAGAATCTGGTGTTACTGTATTTT |
| 217814_at | CCDC47 | 0.457459652 | GTATCTGCACGAGCACTTAGCTTGT |
| | | | CACTTAGCTTGTTCAGATCTCTGCA |
| | | | AGGTCATTGCTTGTACCAGGTAATT |
| | | | GGGTATTTTTTGTTGATGCTTTAGT |
| | | | GATGCTTTAGTGCAGGCCTGTTCTG |
| | | | GTGAAAACAGCATGTGCTGCTGCCT |
| | | | TTGTAACTGCATGGAAACTTTTCAC |
| | | | TTTTCACATGGGTTTTTCTCCAAGT |
| | | | TATAGTAGTGGCCTTGTTTTACAAA |
| | | | AAGTCCCATACATTTGGACCATGGC |
| | | | ATGAACTACCTATGGACATCTATTA |
| 222432_s_at | CCDC47 | 0.40877297 | CTGGAGGAGGCTGCATTGAGGCGTG |
| | | | GAAAGCCATGTAAAGCCATCCCAGA |
| | | | ATTTGAGTTCTGATGCCACCTGTAA |
| | | | TGCCACCTGTAAGCTCTGAATTCAC |
| | | | GAAAAACGCCAGTCCATTTCTCAAC |
| | | | CTCAACCTTAAATTTCAGACAGTCT |
| | | | TCATCTACTCTGTTTGGGGTTTGGG |
| | | | AGATACCTGGAAAGGGCTCTGTTTC |
| | | | TCATCAGTGCTTTTAGTACTTCAGT |
| | | | GTAGATAACCAGATTGTTGCTTTTT |
| | | | GACTGACTCTAAACCAAGATTCTGC |
| 218722_s_at | CCDC51 | 0.405090667 | GAACACCATCTATAGCACCCTGGTC |
| | | | GCACCCTGGTCACCTGTGTGACATT |
| | | | TGTGACATTTGTGGCCACACTGCCT |
| | | | GCTATTCAAAGCCAGCTAACCCCTG |
| | | | GAAGCGAGCCTTTGGGGGCATGTAC |
| | | | GGGCATGTACAACCTCAATCTGAAG |
| | | | GGAGCAGTATCTGTGTGGCTCACCA |
| | | | AGCAGGCATGCTTCGCTTTGTAGAC |
| | | | AGATGTAGATGTCCTTTCAGCTGCC |
| | | | AGTCATTCCAGGCAAGTCCATTCAT |
| | | | CAGCAGACGGGGCTATGCCCAGCTT |
| 227783_at | CCDC57 | 0.618837339 | TCCTCCAGCAGCCGACAGGAGGCCC |
| | | | AGGCCCGTCAAGATGCAGGCAGGCA |
| | | | AAGATGCAGGCAGGCATTGCCACCC |
| | | | GGCATTGCCACCCCAGGGATGAAGA |
| | | | TCCTGCAAAAGCTAAAGGCTGCCAG |
| | | | CCCCCAAGATCCGTAACTACAACAT |
| | | | ACAACATTATGGACTGACTTCCTCC |
| | | | AGCCGGCCCAGGAGGAAGGCCATGC |
| | | | CCAGGAGGAAGGCCATGCGTCTCTG |
| | | | GTGGGCACAGCGTGCAGGGTGGAGG |
| | | | TCTCGCCCAAGTGAGGCCTGTGTGC |
| 215343_at | CCDC88C | 0.401296785 | AAGGGATCAGAACTCTCGTGGGCCT |
| | | | CCTCCAGTGTGTCGCAAGTTTTTGC |
| | | | GAAAAACTCTCCGGCAGTAAAGCCT |
| | | | GTAAAGCCTAAAGTTCCACATCCAC |
| | | | TGATTTCTCTCCTAAGGGTATCCCG |
| | | | CCCGGAGTAACTTCTGCACATGGAT |
| | | | ACATGGATGCCTGGGACTTCACAGC |
| | | | GTCCAAACACATTAACTGCAGCATA |
| | | | TAGCATGTTCCCAATGATGACTTAC |
| | | | GATGACTTACAGCACTATGCCTTTT |
| | | | GCAACTACAATGACTGTACTCTCTA |
| 214049_x_at | CD7 | 0.494625916 | GAATTCGGCGGCATGTGTGGTGTAC |
| | | | GTGTACGAGGACATGTCGCACAGCC |
| | | | CAACCAGTACCAGTGACCCAGTGGG |
| | | | TCCCACGGCTGCAGCAGAGTTTGAA |
| | | | AGCAGAGTTTGAAGGGCCCAGCCGT |
| | | | AGCTCCAAGCAGACACACAGGCAGT |
| | | | CCCACGGTGCTTCTCAGTGGACAAT |
| | | | TCAGTGGACAATGATGCCTCCTCCG |
| | | | GAGGAAGCCTGACTGTCCTTTGGCT |
| | | | GAGGGCTTTTCTGTGGGATGGGCCT |
| | | | CCACCCAGCCGTACCAGAAATAAAG |
| 214551_s_at | CD7 | 0.359343344 | CCAGGCCATCACGGAGGTCAATGTC |
| | | | ATCACGGAGGTCAATGTCTACGGCT |
| | | | CGGAGGTCAATGTCTACGGCTCCGG |
| | | | GAGGAACAGTCCCAAGGATGGCACA |
| | | | CGTGTGTGCTGGCGAGGACACAGAT |
| | | | GTGCTGGCGAGGACACAGATAAAGA |
| | | | GGGATAAGAATTCGGCGGCATGTGT |
| | | | GAATTCGGCGGCATGTGTGGTGTAC |
| | | | GGCGGCATGTGTGGTGTACGAGGAC |
| | | | GTGGTGTACGAGGACATGTCGCACA |
| | | | TGTACGAGGACATGTCGCACAGCCG |
| 204126_s_at | CDC45 | 0.983080062 | GGCCTGGAACTCGCCAAGAAGCAGC |
| | | | TGCTCTCTCATGGAGGGCACTCCAG |
| | | | GGCACTCCAGATGTCATGCTGTTCT |
| | | | TGCTCAGCAAACACCTGCTCAAGTC |
| | | | GCTCAAGTCCTTTGTGTGTTCGACA |
| | | | GACAAAGAACCGGCGCTGCAAACTG |
| | | | GCATGGCACAGTGACCGTGGTGGGC |
| | | | CCCCAGAGACCGACAGCTCGGACAG |
| | | | GATGCTGCACAACCATTTTGACCTC |
| | | | AGTTTCTGGACGCACTTATTTCCCT |
| | | | TTTCCCTCCTGTCCTAGGAATTTGA |
| 221436_s_at | CDCA3 | 0.971627813 | GCACGGACACCTATGAAGACCAGCA |
| | | | CCCCAAGCCCACTGGTGAAACAGCT |
| | | | CCAGAGGCACCTTTATCTTCTGAAT |
| | | | CTGAATTGGACTTGCCTCTGGGTAC |
| | | | CCAGATCTTCAGGTTCTATGCGCAA |
| | | | GCAAGGTACTAGGGAGATCCCCCCT |
| | | | TCCTGCAGGATGACAACTCCCCTGG |
| | | | TACGACAGGGTAAGCGGCCTTCACC |
| | | | GGAGCCATTCTTGGAACTGGACGAC |
| | | | GAGCAAGGCCAGGACCATGACAAGG |
| | | | AAAATCAGCACTTTCCCTTGGTGGA |
| 223307_at | CDCA3 | 0.97567222 | AATGGCTTGTTTTCTTAGACTCCTC |
| | | | CCTCCTCAGCTACCAAACTGGGACT |
| | | | GCTACCAAACTGGGACTCACAGCTT |
| | | | GGACTCACAGCTTTATTGGGCTTTC |
| | | | TTATTGGGCTTTCTTTGTGTCTTGT |
| | | | TTCTTTGTGTCTTGTGTGTTTCTTT |
| | | | CCTGCATGGCCCCAGCAATGCAGTC |
| | | | ACCCAGGGCCTGGTGATATCTGTGT |
| | | | CCTGGTGATATCTGTGTCCTCTCAC |
| | | | CTTCTTTCCCAGGGATACTGAGGAA |
| | | | GGGATACTGAGGAATGGCTTGTTTT |
| 204029_at | CELSR2 | −0.38609522 | TTGGGATGGGTTCGTGTCCAGTCCC |
| | | | TCCAGTCCCGGGGGTCTGATATGGC |
| | | | CTGATATGGCCATCACAGGCTGGGT |
| | | | ACAGGCTGGGTGTTCCCAGCAGCCC |
| | | | GCCGACTGCTTTTCATCTGAGTCAC |
| | | | AGTCACCATTTACTCCAAGCATGTA |
| | | | AAGCATGTATTCCAGACTTGTCACT |
| | | | CACTGACTTTCCTTCTGGAGCAGGT |
| | | | GTTTCTCATTTGTGAGGCCAGCCTC |
| | | | TCCCCTCAGCAATTCCTGCAAAGGG |
| | | | GCTGGATGCTAACTTGATACTAACC |
| 36499_at | CELSR2 | −0.34862803 | CTCCCTGTGAAGAGAGAGTTAATAT |
| | | | TCCCAGCAGCCCTGGCTTGGGGGCT |
| | | | TGGCTTGGGGGCTTGACGCCCTTCC |
| | | | CTCTCCTCAGTTTTGCCGACTGCTT |
| | | | CCAAGCATGTATTCCAGACTTGTCA |
| | | | ATGTATTCCAGACTTGTCACTGACT |
| | | | CTTGTCACTGACTTTCCTTCTGGAG |
| | | | TTTCCTTCTGGAGCAGGTGGCTAGA |
| | | | GAAAGGCTCCTGTTTCTCATTTGTG |
| | | | TTCTCATTTGTGAGGCCAGCCTCTG |
| | | | CTCTGGCTTTTCTGCCGTGGATTCT |
| | | | TTAACTGGTTTTTACTACTGATGAC |
| | | | TAACTGGTTTTTACTACTGATGACT |
| | | | CCATCAGATTGTACAGTTTGGTTGT |
| | | | TACTACTGAATAAACTAGTTCTGTG |
| | | | ACTGAATAAACTAGTTCTGTGCGGG |
| 204962_s_at | CENPA | 1.01511874 | AGACCACTTTGAGCAGTTGCCTGGA |
| | | | GAAGGCTGGGCATTTCCATCATATA |
| | | | CATTTCCATCATATAGACCTCTGCC |
| | | | CCCTTCAGAGTAGCCTCACCATTAG |
| | | | CCTCACCATTAGTGGCAGCATCATG |
| | | | GAGTGGACTGTGCTTGTCAACGGAT |
| | | | GTCAACGGATGTGTAGCTTTTCAGA |
| | | | GCTTTGATGTTCTGGTTACTTCTAG |
| | | | TTACTTCTAGTAAATTCCTGTCAAA |
| | | | TCAACACCGTTCCAAAGGCCTGAAA |
| | | | GAGACTCCAAGGTTGACTTTAGTTT |
| 210821_x_at | CENPA | 0.920552048 | CCCTTCAGCCGCCTGGCAAGAGAAA |
| | | | GACTTCAATTGGCAAGCCCAGGCCC |
| | | | GGCCCTATTGGCCCTACAAGAGGCA |
| | | | GTTCATCTCTTTGAGGACGCCTATC |
| | | | ACATGCAGGCCGAGTTACTCTCTTC |
| | | | GATCCGGGGCCTTGAGGAGGGACTC |
| | | | CACCCAGTGTTTCTGTCAGTCTTTC |
| | | | TCTTTCCTGCTCAGCCAGGGGGGAT |
| | | | GACTCTCCAGAGCCATGACTAGATC |
| | | | TGGATTCTGCGATGCTGTCTGGACT |
| | | | TGTCTGGACTTTGCTGTCTCTGAAC |
| 226788_at | CENPT | 0.387999504 | CTCAGTACTGTCAACCAGTGCCCAG |
| | | | GGAGTTCAACAATGGCCTGCGGTCC |
| | | | AGGGCAGAGTCTAAGGCCCCAGCTT |
| | | | GATGGGGTCTGGGAGTCCAGCAGGC |
| | | | TTCACATTCCGTGCTTCTTGCGGAT |
| | | | TGACAGCCATGGCAAGCAGCCGATC |
| | | | CAGCTTGGCCTCAGTGAGACGCAGG |
| | | | CCCAGCTTCCACTTCAGGAGGAAAC |
| | | | GTCGGAGCCAGTATCAGGGAAGCCC |
| | | | CAACTGGGGGCCCATAGGGCACTCG |
| | | | CCAGGTCACCAGCAAGAGAGTCCAG |
| 229448_at | CERS1 | 0.51372688 | AAGGGAGAACCCATCAGATTCGCCT |
| | | | GGCCTCTGAGTTTGACAGGGGAGCC |
| | | | CTGGGAGCTCAGACTCAGTCCAGCC |
| | | | GTGTCTGGGCCAGGGATGAACGGAG |
| | | | GCAGAGTCGGGTGTGCAGTGTCTCA |
| | | | CCTGGAAGGTGCCGACCAGCCAGGC |
| | | | GCCCTCTGATTTGGCCGGTGGGGGC |
| | | | GGGCCATCGGTGACGTGGGAACGAT |
| | | | CTCAGAGCTCCGTGACGTTTTTTGG |
| | | | TGCAGACATTTAACACATCCGGGGC |
| | | | GTAGCCAGGCAGAGGAGCGTCAGAC |
| 229595_at | CHCHD4 | 0.662554312 | GTGAGCTGATTTATTCTGATTCATT |
| | | | GATGGGGCCATATCTACTAGCAGAG |
| | | | TGATTTCTGCAAACCCATCTTGACC |
| | | | GCAAACCCATCTTGACCTTGAGTAT |
| | | | AGGGGTACTGTACTTTATTCCTGAT |
| | | | GGTTTCCATGTAGGTGTTGAGCTCC |
| | | | TTTGGACCCTTCCATTCATAATCCC |
| | | | TTGCCCTGAATTTTGCCACTTTTAA |
| | | | GGCTGTTCCTTGTTATTCCGAAAGC |
| | | | ACTGGCTCTCAGTCTAGTCAGGTGC |
| | | | GGTGGGGACCTAATTATTACCAGAG |
| 203044_at | CHSY1 | −0.89770937 | TTTCATCCTGTCTGTGTTATGTGGG |
| | | | TTTGTTTTATCCTTTGTATCTGAAA |
| | | | TTCAGAGCTCTGCCATTTCTTGAGT |
| | | | GTATCGGGAGTGTGTTTAGTCTGTT |
| | | | TAAACCGATCTCCAAAGATTTCCTT |
| | | | AATTTTGGTGCTCATGTGTTTTGGG |
| | | | AAATTCTCAGATCAAATGTGCCTTA |
| | | | GACTTGCCATTTTAATACACGTCAT |
| | | | TACACGTCATTGGAGGGCTGCGTAT |
| | | | GTAAATAGCCTGATGCTCATTTGGA |
| | | | AACCATTTTGTCTCATTATTCCTGT |
| 202559_x_at | CHTOP | −0.39904932 | ACTTGCCACCAGCTTGTGCATTTAG |
| | | | CTAGGCCCCACTGCTCTAAGGGGCA |
| | | | GGGCATTTACTACAGCACCTATTAA |
| | | | GGACGAGGGAGAGGTGCCCTTGCTC |
| | | | TGCTCGCCCTGTATTGACCAAGGAG |
| | | | GGACACCTGGATGCTGAGTTGGATG |
| | | | GAGTTGGATGCCTACATGGCGCAGA |
| | | | ATGGCGCAGACAGATCCCGAAACCA |
| | | | AACCAATGATTGAAGCCTGCCCATC |
| | | | CCATCCTCCCATGAGAGACTCTTGT |
| | | | TAGGCTGTGGACTTACTTGCCACCA |
| 212784_at | CIC | −0.44453195 | TGGGGGCAGGAAGGTTATCTCCTCC |
| | | | TCCTCTCCAGTTTGGGGCGGAATGA |
| | | | TGAGGCCTGCTCCTCTTGTAAATAC |
| | | | CCAAGCCCCTGTACATAACCTGGAG |
| | | | TAACCTGGAGCGTGTGACCTTCAGA |
| | | | GACCTTCAGAGCTTTTCACTTTATG |
| | | | TGCAAAATGGCTCCTGTGAGGGCTG |
| | | | GGGAGGCGCCTGTGGAATAGGGGGA |
| | | | CAGAGGGGCTGGACTCAGGTTAGTT |
| | | | TGCACTTTGCCACAGGCACGGGGAG |
| | | | CTTACTGTGCCGAGAAGCCGCAATG |
| 221223_x_at | CISH | −0.56580607 | CTGAGCCCTGGTAGTCCAAAGACCC |
| | | | CTGGTTCTTCCCTGTGGAAAGCCCA |
| | | | AAAGCCCATCCTGAGACATCTTGCT |
| | | | GGCAATCCTGGATGTCCTGGTACTG |
| | | | CTCTGTGAATGTGTCCACTCTCTTC |
| | | | TTCTGCCCCCAGCCATATTTGGGGA |
| | | | AGAAAATGCAGCCGGAGCCTCAGTC |
| | | | CATAAAGCTGGTCTCACTGTGGCGC |
| | | | GCCACCACTGCAGTTCTGCTAGGTC |
| | | | GAACAGTTTGGTGGTCTTTTCTCTT |
| | | | TTTCTCTTCCACTGATTTTTCTGTA |
| 223377_x_at | CISH | −0.50821557 | TGAGCCCTGGTAGTCCAGAGACCCC |
| | | | CTGGTTCTTCCCTGTGGAAAGCCCA |
| | | | AAAGCCCATCCTGAGACATCTTGCT |
| | | | GGCAATCCTGGATGTCCTGGTACTG |
| | | | CACCCGTCTGTGAATGTGTCCACTC |
| | | | AGAAAATGCAGCCGGAGCCTCAGTC |
| | | | GCATAGAGCTGGTCTCACTGTGGCG |
| | | | GCCACCACTGCAGTTCTGCTAGGTC |
| | | | GAACAGTTTGGTGGTCTTTTCTCTT |
| | | | TTTCTCTTCCACTGATTTTTCTGTA |
| | | | GACATTATACCTTTATTACCTCTTT |
| 223961_s_at | CISH | −0.46650396 | CCTGGCCACCTGAACTGTATGGGCA |
| | | | GGAGGATGACATGCAGAGGAACTGA |
| | | | GATCGACAGTGACTAGTGACCCCTT |
| | | | GTGACTAGTGACCCCTTGTTGAGGG |
| | | | GGTAAGCCAGGCTAGGGGACTGCAC |
| | | | GGGACTGCACAATTATACACTATTT |
| | | | TTATTCTCCTTGGGGTTGGTGTCAG |
| | | | TGTGGAAAGCCCATCCTGAGACATC |
| | | | TCCTGAGACATCTTGCTGGAACCAA |
| | | | GGAACCAAGGCAATCCTGGATGTCC |
| | | | GTAAGAAAATGCAGCCGGAGCCTCA |
| 208659_at | CLIC1 | 0.557267522 | CAAAGGCCCTGGTGGTTTCCACATT |
| | | | ATTGCTACCCAATGGACACACTCCA |
| | | | GTGGGCAGGGAATCCTGGAGCACTT |
| | | | GGAGCACTTGTTCCGGGATGGTGTG |
| | | | GAAGATGAAGGTGTCTCTCAGAGGA |
| | | | TTTTTGGATGGCAACGAGCTCACCC |
| | | | GTACCGGGGATTCACCATCCCCGAG |
| | | | CCTTCCGGGGAGTGCATCGGTACTT |
| | | | TCGGTACTTGAGCAATGCCTACGCC |
| | | | GCCCGGGAAGAATTCGCTTCCACCT |
| | | | GCAAAGGCCCTCAAATAAGCCCCTC |
| 209081_s_at | COL18A1 | −0.41482881 | TGCCCATCGTCAACCTCAAGGACGA |
| | | | TTCTCCTTTGACGGCAAGGACGTCC |
| | | | GACGGCAAGGACGTCCTGAGGCACC |
| | | | CTGGCCCCAGAAGAGCGTGTGGCAT |
| | | | CAGGCTGACCGAGAGCTACTGTGAG |
| | | | AGAGCTACTGTGAGACGTGGCGGAC |
| | | | TGTGAGACGTGGCGGACGGAGGCTC |
| | | | CCTACATCGTGCTCTGCATTGAGAA |
| | | | TGAGAACAGCTTCATGACTGCCTCC |
| | | | GCTGCCATACTTTCCTGTATAGTTC |
| | | | ATACTTTCCTGTATAGTTCACGTTT |
| 209082_s_at | COL18A1 | −0.40498176 | TGGCTGGGACGTGGCTCAGCCAGCA |
| | | | TCAGCCAGCACTTGTCCAGCTGAGC |
| | | | GAGCGCCAGGATGGAACACGGCCAC |
| | | | GCACAGGACATGCGGTAGCCAGCAC |
| | | | GGTAGCCAGCACACAGGGCAGTGAG |
| | | | GCTCCAGATGCAGGGCAGTCATTGG |
| | | | GTCATTGGCTGTCTCCTAGGAAACC |
| | | | AGGTGCAACAAGGTCCTCTGTCAGT |
| | | | GAGTCATTCGTTCTGTGGAGGGACA |
| | | | CCTCAGGACTGCGACGAAACCGGTG |
| | | | GGGCTGGTTCTGTAATTGTGTGTGA |
| 201264_at | COPE | 0.575376523 | ACCTCGCCCGGAAGGAGCTGAAGAG |
| | | | GAGAATGCAGGACCTGGACGAGGAT |
| | | | GAAGCTGCAGGATGCCTACTACATC |
| | | | GATGCCTACTACATCTTCCAGGAGA |
| | | | GGAGATGGCTGACAAGTGCTCGCCC |
| | | | TGCTCAATGGGCAGGCGGCCTGCCA |
| | | | TGCTGCAGGAGGCGCTAGACAAGGA |
| | | | AGGATAGTGGCTACCCAGAGACGCT |
| | | | CCCAGAGACGCTGGTCAACCTCATC |
| | | | CCCATCCCTTCATCAAGGAGTACCA |
| | | | GCCCAGAGCTGTCAGGACCATGAAG |
| 221754_s_at | CORO1B | 0.395216845 | CAGCGGGACCTGAAGATCAGCCGGC |
| | | | CGCAACGTGTTGTCTGACAGCCGGC |
| | | | CCCTGAGGGCGCTGGTCAAGGAGCA |
| | | | TCAAGGAGCAGGGCGACCGCATCTG |
| | | | CAGCTGGGCCGCATGGAGAACGGGG |
| | | | TGGGCCGCATGGAGAACGGGGATGC |
| | | | GGAGAACGGGGATGCGTAGGGCCAC |
| | | | CCAGAGCCTCTGAGGCAGCGCAGGG |
| | | | CCTCCCCAGAGGAGGCGGGAGGGTG |
| | | | GAGGGTGGGCTCTATATTTTCATTC |
| | | | GTGGGCTCTATATTTTCATTCCAAA |
| 209833_at | CRADD | 0.525119204 | ATGACCGACCTGCCTGCAGGTGACA |
| | | | GGTGACAGATTGACTGGGATCCCCT |
| | | | TGAGTGGGAGCCCATGGTGCTGTCT |
| | | | GGGACTGTCCCAGACGGATATCTAC |
| | | | GGATATCTACCGCTGTAAGGCCAAC |
| | | | CAGCAACCGCTGGGGAGTGTGTCCC |
| | | | GTGTCCCTGAGTCATGTGGGCTTGA |
| | | | TGGGCTTGAATCCTGACTTTCACTC |
| | | | CAGGGTTTCCACTAGACATTACTTG |
| | | | CAGATTACTCAGCAGATCTCCCATG |
| | | | GATCTCCCATGTTGGCTCAACAATT |
| 226455_at | CREB3L4 | −0.41959118 | TTCAGTCCATTCCAGAGTCGACCAG |
| | | | GGGTCTGAGGATTACCAGCCTCACG |
| | | | GACTTCCAGAAATATCCTGACCCAC |
| | | | GAAGCCAAGACCCAGTGGGCGCATC |
| | | | TGTGAGCTGGAACAGACCTTCCTGG |
| | | | GGGATTCCTACTTAGGTGTCTGCCC |
| | | | CCCTCAGGGGTCCAAATCACTTCAG |
| | | | ACACCCCAAGAGATGTCCTTTAGTC |
| | | | CTTTAGTCTCTGCCTGAGGCCTAGT |
| | | | TGAGGCCTAGTCTGCATTTGTTTGC |
| | | | GAGGGTACCTCAAATACTTCTGTTA |
| 226307_at | CRTC2 | −0.39881009 | CTAAACATGCTGAGTGACCCCTGTG |
| | | | GCTGTGGAGGAGTCATTCCGCAGTG |
| | | | CAGTGACCGGCTCCAATGAGGGCAC |
| | | | CAATGAGGGCACCTCATCACCATCC |
| | | | TCCCCCTGGCAGGTAGAGACTCTAC |
| | | | CCAGATCCTCTTTCTAGCATGAATG |
| | | | GGCCCCTGAATTCTGCGCAAGGGAT |
| | | | GATGGGCCTGGGGGAACTCAAGGGA |
| | | | AGCACTTGTAACTTTGAACCGTCTG |
| | | | GAACCGTCTGTCTGGAGGTCAGAGC |
| | | | CTCTTCCCCTTGCAGTGGAGGAGAG |
| 202329_at | CSK | 0.478812142 | GCCACTCGCCTTCTTAGAGTTTTAT |
| | | | CACTCGCCTTCTTAGAGTTTTATTC |
| | | | TGAGATTTTTTTTCCGTGTGTTTAT |
| | | | GGAGAAAGAAAGTACCCAGCAAATG |
| | | | TGTTTGCGCTTGACCATGTTGCACT |
| | | | GCTTGACCATGTTGCACTGTTTGCA |
| | | | CATGTTGCACTGTTTGCATGCGCCC |
| | | | CCCGAGGCAGACGTCTGTCAGGGGC |
| | | | CAGACGTCTGTCAGGGGCTTGGATT |
| | | | CGTCTGTCAGGGGCTTGGATTTCGT |
| | | | TCAGGGGCTTGGATTTCGTGTGCCG |
| 221021_s_at | CTNNBL1 | 0.419323318 | GAACCTGAGAGGGCAGCAGCGGACC |
| | | | AGCGGACCCGGCTTCTGAATAAATT |
| | | | GGGTGCAATGCAGGTGGCGGACAAG |
| | | | GAAAAACACGACATGGTCCGGCGAG |
| | | | GGTCCGGCGAGGAGAGATCATCGAC |
| | | | CGAGGAGGAGTTCTACCTCCGGCGC |
| | | | TCCCCCAGATTCGCCAGAGGGTTCA |
| | | | AGAGGGTTCACCAGATCCTAAACAT |
| | | | GGAAGCTCCATCAAAATTGTCAGGC |
| | | | AGAGAACATCGGGGACGGCCGGAGC |
| | | | GAGCAAAAGCGCATCCTGGGCTTGC |
| 209617_s_at | CTNND2 | 0.700055961 | GCTCCGGGAACAGTGCATGTGCATG |
| | | | GTGCATGCATACCACAAGACATTTC |
| | | | TAGTTTGTTAAAGCCTGTTCCATAG |
| | | | ATGACAGTGGGCAGCACCTTTCTAG |
| | | | GCAGCACCTTTCTAGCGTGAGCTGT |
| | | | GTGCTTTATACTGAACGTGGTTGAT |
| | | | AGGAGAGACGAGGCATTCGGGCCGG |
| | | | GGCGTAAGGGTTATCGTTAAGCACA |
| | | | TACACACTGTGTGGGGGACGGCTTC |
| | | | GTGACTCTAGGCTTCAGGTTGCATT |
| | | | TGCATTGGGGTTCCTCTGTACAGCA |
| 209618_at | CTNND2 | 0.594537267 | GAAGCTATTTCATTTGCTGTTCATC |
| | | | TGTACTGTATCTATTCTTCTGACCA |
| | | | TATTCTTCTGACCATCTAGTGACTC |
| | | | GTGACTCAGGATATTAGGCCCAGTT |
| | | | TTTCCACACATTCACGCATACTTGG |
| | | | ATACTTGGATATCAACCCTCTCTAC |
| | | | ATCCCCCTCAGAACACGATAAACCA |
| | | | ACCATGGCCAATTCAGTTTCACTTT |
| | | | AAAATGTAAACTGCTCGCCTTATTC |
| | | | GAACATGGGCCGCGGGTAAACTAGC |
| | | | TAAACTAGCTTTGCTCTTTAGATGC |
| 226833_at | CYB5D1 | −0.52321368 | CATCACCTCTTGTCTAAACTGCTAC |
| | | | CTTCTGACTTCCATGCTGCAATGAG |
| | | | AACATCGAACTTTCCTTAGCTTCTT |
| | | | CTTCAGTGGCTTCCAACTGCTTTTG |
| | | | ATAAATCAGGCTCATCTCGCAACAC |
| | | | GTTCTCTATGGCCTAGACACACTGG |
| | | | AGTTCATTACATGTCTTGCCTCAGA |
| | | | CTTTCCACCTAGCTGATCCTAAATG |
| | | | TAAATGTTCCTTCCTCAGGGAGGTC |
| | | | GCTGGCTGCGCTGCTAGATTGTAAG |
| | | | TTCACATCTTGCTCACTGCTATATT |
| 219001_s_at | DCAF10 | −0.47812956 | GGGATTACCAAAGGCTGGAGCGATT |
| | | | TTAAGCTATGCACTAGCCTTGCCCT |
| | | | CCCTCTTAGGTTGCATTCTCTTTAG |
| | | | TTCTCTTTAGGCCACTGGTTCTCAA |
| | | | GGCCACTGGTTCTCAAACATTAGGG |
| | | | AACATTAGGGTGCACTGTAACCATT |
| | | | TGAAAAGTGCAGAAACCTGAGCCTC |
| | | | GTATTTTTCATAGCAACCTCAAGTA |
| | | | AGGGTCTCGGGATTGCAGGTTGAAA |
| | | | GAAAAACACAACCTTAATCAGCAGT |
| | | | GCAGTAAATTCTTCTCTACTCGGCC |
| 222804_x_at | DCAF10 | −0.55404981 | AAAGTTCTCTCCAACACATTGTCAG |
| | | | CATTGTCAGATTGCCTCAGGGTGCC |
| | | | GTGGACGGGTTTCTTTGTATCAGCC |
| | | | GGAACTCTTCTGGTGTTTGACTTAG |
| | | | GATCCTGGTTCTTATGGGTCCATGA |
| | | | GGTCATCCAGCATCATACAGGCATC |
| | | | ACAGGCATCTCCAAGTTAGACTCTA |
| | | | AGCATCATCTTTTGCAGCATTCCTC |
| | | | TGATCTGTGCCACTGAACTCCAGTT |
| | | | CAGTTCTTCTGGTCATTTTGCATGG |
| | | | TTTTGCATGGTAGCTCTTGTCACGT |
| 226511_at | DCAF10 | −0.53751669 | GAAACTCCCAGTTAAAGCCTAGGCT |
| | | | AGCCTAGGCTAGCAATTTTTTTTAG |
| | | | ACTAAGGATGCTGCTAGACTAAGGA |
| | | | CAGAGGGGTCTATCATGCTTTTAAG |
| | | | GAGTATTTTGGATGCCATTAAACTT |
| | | | GGCTTAAATTATCACGTATTGTTAC |
| | | | AATCATGTCCTAAGAATTTCTCCCA |
| | | | GAATTTCTCCCATTCAAATGATAAT |
| | | | TCAAAGTTACCATTACGCTGCTCTC |
| | | | GCTCTCTTGTAAATGAACTAGGGAT |
| | | | ATCTCACATTCACCTCCTATATGTA |
| 230679_at | DCAF10 | −0.40321124 | TTTCTCCCTCATTTAGATTTCATGG |
| | | | GGAAATTTGGAGTATTCCAGACAAT |
| | | | TTCCAGACAATATACTAGATACCCA |
| | | | TATACTAGATACCCAGAAACTTTTC |
| | | | AGAAACTTTTCTCAGTAGGTTCTGA |
| | | | TAGGTTCTGAGGTGTTTTAAGTTCT |
| | | | TTTAAGTTCTTATGCTAGACTGTAA |
| | | | TTATTTATTCTTGTATCCTCAGTGC |
| | | | CTGGTACAGGACTTGACACAGAGTA |
| | | | GGACTTGACACAGAGTAGTTGTTCA |
| | | | ATCTGGTCCAAAGTCTTTAAAATAG |
| 210811_s_at | DDX49 | 0.683776996 | GTGTGAGATCAAACTGGAGGCGGCC |
| | | | TCAAACTGGAGGCGGCCCACTTTGA |
| | | | GGCGGCCCACTTTGACGAAAAGAAG |
| | | | GGAGATCAACAAACGGAAGCAGCTG |
| | | | TGGAGGCCAAGCGCAAGGCTGAGCT |
| | | | AGCAGAAGAACCGGCGCTTCAAGGA |
| | | | GGAGGAGACGCTGAAGCGACAGAAG |
| | | | GACTCGTCCATGGAGCTGAGGGTCG |
| | | | GTCCATGGAGCTGAGGGTCGGAGGA |
| | | | GGGTGCCGCATACAGGAGGTGCTTA |
| | | | GCCGCATACAGGAGGTGCTTAATAA |
| 31807_at | DDX49 | 0.753262317 | CCACTTTGACGAAAAGAAGGAGATC |
| | | | GGAAGGACCCTGACCTGGAGGCCAA |
| | | | AAGGACCCTGACCTGGAGGCCAAGC |
| | | | AGAACCGGCGCTTCAAGGAGAAGGT |
| | | | ACGCTGAAGCGACAGAAGGCTGGCA |
| | | | TGCCCAGTCCTTGACTCGTCCATGG |
| | | | CCCAGTCCTTGACTCGTCCATGGAG |
| | | | CTGAGGGTCGGAGGAACCTTCCTTG |
| | | | AGTGCCCCACAGCAGAACCCGTGGG |
| | | | CAGCAGAACCCGTGGGCGCTCGTGT |
| | | | TTCCCTGAGCCCTGGCCAAGATTCA |
| | | | GCCCTGGCCAAGATTCAGGCTGCAG |
| | | | CAAGATTCAGGCTGCAGGGGAAGAA |
| | | | ACATGACCGGGAGGTTGTGACCCCA |
| | | | CATGACCGGGAGGTTGTGACCCCAA |
| | | | GGTGCCGCATACAGGAGGTGCTTAA |
| 236496_at | DEGS2 | −0.41597379 | CACTCCTGGGTGAAGGTGCTCTGGG |
| | | | GAAGGTGCTCTGGGATTTTGTGTTT |
| | | | TTTTGTGTTTGAGGACTCCCTGGGG |
| | | | GGCCCTATGCCAGGGTGAAGCGGGT |
| | | | GTGAAGCGGGTGTACAGGCTGGCAA |
| | | | GTGTACAGGCTGGCAAAAGATGGTC |
| | | | CAAAAGATGGTCTGTGAGCCCGGGC |
| | | | TGAGAAGCTACATTTCCTTCCTGTG |
| | | | GCCGCACACGCAGCGGGCAAGGAGA |
| | | | GCGGGCAAGGAGATACTGGGTGCGG |
| | | | GGAGATACTGGGTGCGGAAGATCGC |
| 202481_at | DHRS3 | 0.458263723 | GGTGAGCAGGACAGCTCCTGTCCCC |
| | | | TGTCCCCAGCGAAGAATCCGGCTGC |
| | | | TGATGGGTGTAACTGACCCCCACAG |
| | | | TGCTTCTCAAGTCTAACCAGCCTCA |
| | | | CAGCAGTGTGCATAGACCATTTCCA |
| | | | CCATGGACAATGCATGCCCTCGTTA |
| | | | GCATGCCCTCGTTATCTTGAAAAGC |
| | | | CTTCCACAGGCTGCACTCGAGGAGA |
| | | | GATCCACAAATTCTCAGGAACCTAC |
| | | | AGGAACCTACACCTGCATGAACACT |
| | | | TGAGGAGCCACGGAGTTTGGGGGCC |
| 209509_s_at | DPAGT1 | −0.45907357 | TCTCCATTCGATATCAGCTCGTTCG |
| | | | GCTCGTTCGACTCTTCTATGATGTC |
| | | | TACCTCACAGTCTCTAGGATTCCTG |
| | | | CTTTCTCTGTGATCATTGGCATCCT |
| | | | CAGCTTTTTTTGCAGTTATCCACAC |
| | | | CAGTTATCCACACTCACATTTCAGA |
| | | | GAGTCCTGACTCTCAAGGAACCACT |
| | | | CCAGGGCTAGGAACACAGGCTCCAC |
| | | | CAGGCTCCACGGTGACATGTCATTT |
| | | | ACTAAGCAGGGGGCCACATGCTCTC |
| | | | GGGCCACATGCTCTCAATGGAGACA |
| 201907_x_at | DVL3 | 0.341187495 | CGCCAGCAGTCAGCACAGCGAAGGC |
| | | | GCGAAGGCAGTCGGAGCAGTGGCTC |
| | | | CGGAGCAGTGGCTCCAACCGTAGCG |
| | | | AACCGTAGCGGTAGCGATCGGCGGA |
| | | | GCGGTAGCGATCGGCGGAAGGAGAA |
| | | | CCACACCACACGCAGCAGTCTGCGG |
| | | | CCACACGCAGCAGTCTGCGGGGGCC |
| | | | GTCCTTCCGCATGGCCATGGGAAAC |
| | | | ATGGGAAACCCCAGTGAGTTCTTTG |
| | | | GAGTTCTTTGTGGATGTGATGTGAT |
| | | | TGATGTGATGTGAGCAGGGCCCCTC |
| 2028_s_at | E2F1 | 0.949930222 | CAGGGCAGTGCCTGCTCCCAGAATC |
| | | | CTGCTCCCAGAATCTGGTGCTCTGA |
| | | | CCCAGAATCTGGTGCTCTGACCAGG |
| | | | AATCTGGTGCTCTGACCAGGCCAGG |
| | | | ACGGTGAGAGCACTTCTGTCTTAAA |
| | | | GAGAGCACTTCTGTCTTAAAGGTTT |
| | | | TATTTATCGAGGCCTCTTTGGTGAG |
| | | | ATCGAGGCCTCTTTGGTGAGCCTGG |
| | | | TCCCTCTACCCTTGAGCAAGGGCAG |
| | | | GGGTCCCTGAGCTGTTCTTCTGCCC |
| | | | CCTGAGCTGTTCTTCTGCCCCATAC |
| | | | TTCTGCCCCATACTGAAGGAACTGA |
| | | | CCCCATACTGAAGGAACTGAGGCCT |
| | | | AAGGAACTGAGGCCTGGGTGATTTA |
| | | | GAGACAGACTGACTGACAGCCATGG |
| | | | AGACTGACTGACAGCCATGGGTGGT |
| 204947_at | E2F1 | 0.927414606 | CTGGCTGGGCGTGTAGGACGGTGAG |
| | | | TAGGACGGTGAGAGCACTTCTGTCT |
| | | | ATTTATTTATCGAGGCCTCTTTGGT |
| | | | CTCCCTCTACCCTTGAGCAAGGGCA |
| | | | GGAACTGAGGCCTGGGTGATTTATT |
| | | | GACTGACTGACAGCCATGGGTGGTC |
| | | | GGTGGTCAGATGGTGGGGTGGGCCC |
| | | | GCTGCCCCCCAGGATGGATATGAGA |
| | | | TGGGGGACCTTCACTGATGTGGGCA |
| | | | ACCCTCCAATCTGCACTTTGATTTG |
| | | | TGATTTGCTTCCTAACAGCTCTGTT |
| 202023_at | EFNA1 | −0.79399154 | GCTGGAAGGGGCCACGTGGATGGGC |
| | | | AGAGGCAGCATGCTTGGGCTGACCC |
| | | | CTGTGCCAACCTGTTCTTAGAGTGT |
| | | | GAGTGTAGCTGTAAGGGCAGTGCCC |
| | | | GCAGTGCCCATGTGTACATTCTGCC |
| | | | ACATTCTGCCTAGAGTGTAGCCTAA |
| | | | GTGTAGCCTAAAGGGCAGGGCCCAC |
| | | | AGGGCCCACGTGTATAGTATCTGTA |
| | | | CCACCTTCACCTCGGAGGGACGGAG |
| | | | GAAGTGGAGACAGTCCTTTCCCACC |
| | | | GGCATGGTCCCTTAAGGCACAGTGG |
| 219850_s_at | EHF | −0.79952448 | GATTGAGAACCACCAGTTTAGCTAG |
| | | | GAACCACCAGTTTAGCTAGTCAATA |
| | | | GGATGGTGGTTTATTCTCAGAAGAA |
| | | | CCAGATGAGAGCCAATGTCAGATAA |
| | | | TTTGTCTTTTGGATTATCTGTTTAC |
| | | | TGGATTATCTGTTTACTGTCTCATC |
| | | | TACTGTCTCATCTGAACTGATCCCA |
| | | | GTCTCATCTGAACTGATCCCAGGTG |
| | | | GATCCCAGGTGAACGGTTTATTGCC |
| | | | GGTTTATTGCCTAGATTTGTACTCA |
| | | | GCCTAGATTTGTACTCAGAGGAATT |
| 222932_at | EHF | −0.6110743 | AAGGAGTTAAAAGCTTCTTCTCAAT |
| | | | TGAGCCATGCAATCTGGGAAGCACA |
| | | | GGAAGCACAGGAATAAGTAGACACT |
| | | | ATGAAGACATGTATCCATAAGAAGG |
| | | | ATAAGAAGGAGTGCTCTTCATCAAC |
| | | | TTCATCAACTAATAGAGCACCTACC |
| | | | TAGAGCACCTACCACAGTGTCATAC |
| | | | CACCTACCACAGTGTCATACCTGGT |
| | | | CACAGTGTCATACCTGGTAGAGGTG |
| | | | ATATATTCATGAGGCTGGAAGTAAG |
| | | | GAGGATGGGGCTTAGATAGTATCGA |
| 224189_x_at | EHF | −0.81521604 | ACATCACCAAATGTTCCCTGGGGGT |
| | | | ATTTGCCCTTGATTGAGAACCACCA |
| | | | GAACCACCAGTTTAGCTAGTCAATA |
| | | | CTTCAACCTCAACCTATCTTTATGT |
| | | | AGAGGAGCTTCTTTTCAGAACCCCA |
| | | | AGAACCCCAGATGAGAGCCAATGTC |
| | | | ATTTCCAGGGAAAATCCTCTTTGCA |
| | | | GATTATCTGTTTACTGTCTCATCTG |
| | | | GTCTCATCTGAACTGATCCCAGGTG |
| | | | GATCCCAGGTGAACGGTTTATTGCC |
| | | | GTTTATTGCCTAGATTTGTACTCAG |
| 225645_at | EHF | −0.81425955 | TGCCTGCTATGTGCACGGCATGGGC |
| | | | GCACGGCATGGGCCCATATGTGTGA |
| | | | GATCTCGGTAGTTACGTATTGGGCA |
| | | | AATTATCCTCAGTGTAGCTTCTTGG |
| | | | AAAACTCCTGTTGAGACTGTGTCTT |
| | | | GACTGTGTCTTATGAACCTCTGAAA |
| | | | GAACCTCTGAAACGTACAAGCCTTC |
| | | | AATCTTTCTGTAGTTATCTGCATAA |
| | | | CTGGCTCCTGGGTTGACAATTTGTG |
| | | | GAAACAACTCTATTGCTACTATTTA |
| | | | GTTTATTTGTTTGATGGGTCCCAGG |
| 232360_at | EHF | −0.91281478 | TGAAGTGGAACGGTGACTCTCTCTT |
| | | | CCTGCTAGGAGCCAGCTGGAAGAAT |
| | | | GAGATTCTGCAGATGACAGGATTCT |
| | | | GAAAGAGTGGTCTCACCTCCAAATT |
| | | | TGGTCTCACCTCCAAATTACCATGT |
| | | | GAAGCATAGGGTACCTGGTGTGCCT |
| | | | GTGTGCCTAATCCCTTATAAATGCC |
| | | | ATTTAATTCTTTCCTTATGGTGATA |
| | | | CGTAGAATACTTACTATCCTTGGAA |
| | | | TCCTTTGCAAACAGTCCAGTCACTT |
| | | | ACAGTCCAGTCACTTGCTTGTTAAA |
| 232361_s_at | EHF | −0.89914362 | CAAGTACCAGGTGTGGGAGTGGCTC |
| | | | CTCCTGGACACCAACCAGCTGGATG |
| | | | TGGACACCAACCAGCTGGATGCCAA |
| | | | ACACCAACCAGCTGGATGCCAATTG |
| | | | TGGATGCCAATTGTATCCCTTTCCA |
| | | | ATTGTATCCCTTTCCAAGAGTTCGA |
| | | | GTATCCCTTTCCAAGAGTTCGACAT |
| | | | TCCCTTTCCAAGAGTTCGACATCAA |
| | | | AGTTCGACATCAACGGCGAGCACCT |
| | | | CTCCTCTACAGCAACTTGCAGCATC |
| | | | CTCTACAGCAACTTGCAGCATCTGA |
| 203462_x_at | EIF3B | 0.456133148 | GGTGGACACTGACGAGCTGGACAGC |
| | | | GAGACCATTGAGTTCTTCGTCACTG |
| | | | CACTGAAGAAATCATTCCCCTCGGA |
| | | | AGGAGTGACCTGGAGCACTGTGCGC |
| | | | TGGATTCTGCCATTGCGACACATTT |
| | | | GCGACACATTTTTGTGCCTTTCAGC |
| | | | AGCCCCTGGTGTCTGCAGTGGGGGA |
| | | | GCTTCCACTTCTTTCTTGTTTGGAG |
| | | | GGCTCCGAAGACTTAGCGACGCACT |
| | | | CTGTACACAGCCGAGCAGCATTTCC |
| | | | TCCGTTGAAGGACTTGCATCCCCAT |
| 208688_x_at | EIF3B | 0.483912025 | TGAGCTACAGGACTCCCGAGTGTGA |
| | | | TGGATTCTGCCATTGCGACACATTT |
| | | | GCGACACATTTTTGTGCCTTTCAGC |
| | | | AGCCCCTGGTGTCTGCAGTGGGGGA |
| | | | CAGTGGGGGATTTAAGGCACCCGCT |
| | | | GCTTCCACTTCTTTCTTGTTTGGAG |
| | | | TTGGAGTTTTCTGTTGGAACCGCCG |
| | | | GGCTCCGAAGACTTAGCGACGCCAC |
| | | | CTGTACACAGCCGAGCAGCATTTCC |
| | | | TCCGTTGAAGGACTTGCATCCCCAT |
| | | | CACCGTGCAGGTTGTGGCCGGTTTT |
| 211501_s_at | EIF3B | 0.480989628 | GGAGAGAAGGCGCACCATGATGGAA |
| | | | GATGGAAGATTTCCGGAAGTACCGG |
| | | | GGAGCAGAAAAACGAGCGCCTGGAG |
| | | | AGCGCCTGGAGTTGCGAGGAGGGGT |
| | | | GTTGCGAGGAGGGGTGGACACTGAC |
| | | | GGTGGACACTGACGAGCTGGACAGC |
| | | | CGAGCTGGACAGCAACGTGGACGAC |
| | | | ACGTGGACGACTGGGAAGAGGAGAC |
| | | | GGAGACCATTGAGTTCTTCGTCACT |
| | | | ACCATTGAGTTCTTCGTCACTGAAG |
| | | | GTTTTCTCCGCAGGTTGAACATGGA |
| 203617_x_at | ELK1 | 0.503580012 | CTGCCTGTTTCCTCCCAATGGAGGG |
| | | | CCCCGCTGCCATTTTGATAGTATAA |
| | | | GGGGAGAGGGAGTCATCTCTTCCTA |
| | | | GTCATCTCTTCCTATATTTGGTGGG |
| | | | GATTTGGGGGGGAATCTTCTGCCTC |
| | | | AACATGAATTTTCAGTTCCCTCCCT |
| | | | CAAAGGACCCTTTCAATGTCCCTGG |
| | | | GACATAAAGCCTGTCCTGTCTCTAT |
| | | | CTGTCCTGTCTCTATTCTAGGCAAG |
| | | | GGTTCAAAAGACTCCTGGGCTCACC |
| | | | GATTTGGGGGACAGTGCTACACTCG |
| 203719_at | ERCC1 | −0.54778716 | GGCTGTTTGATGTCCTGCACGAGCC |
| | | | TGCACGAGCCCTTCTTGAAAGTACC |
| | | | GCCCTTCTTGAAAGTACCCTGATGA |
| | | | CCTTCTTGAAAGTACCCTGATGACC |
| | | | TTCTTGAAAGTACCCTGATGACCCC |
| | | | TCTTGAAAGTACCCTGATGACCCCA |
| | | | AAGATCTGGCCTTATGCCCAGGCCT |
| | | | CCCTCAGAAAGCCCGGAGGCTGTTT |
| | | | CTCAGAAAGCCCGGAGGCTGTTTGA |
| | | | GAAAGCCCGGAGGCTGTTTGATGTC |
| | | | AAGCCCGGAGGCTGTTTGATGTCCT |
| 203720_s_at | ERCC1 | −0.47904914 | TTTGGCGACGTAATTCCCGACTATG |
| | | | TCCCGACTATGTGCTGGGCCAGAGC |
| | | | TACATCCATGGGCGGCTGCAGAGCC |
| | | | CCTGGGGAAGAACTTCGCCTTGCGG |
| | | | GAAGCTAGAGCAGGACTTCGTCTCC |
| | | | CTTCGTCTCCCGGGTGACTGAATGT |
| | | | GACTGAATGTCTGACCACCGTGAAG |
| | | | ACAAAACGGACAGTCAGACCCTCCT |
| | | | CCTCCTGACCACATTTGGATCTCTG |
| | | | TTGGATCTCTGGAACAGCTCATCGC |
| | | | CAGCTCATCGCCGCATCAAGAGAAG |
| 228131_at | ERCC1 | −0.47360973 | TACAAGGTTCATGCTTATGGCCTGA |
| | | | GAAAATAACCACATCCCAGGCTGAC |
| | | | ACAGAACATGTTCCACCAAGCCTGC |
| | | | GCCTGCAGAATGTCCAAATGTCCTA |
| | | | CTAAGAATGCAGCCCCCATTACTTA |
| | | | GCAGCCCCCATTACTTAAATATAAC |
| | | | GGTTGCAGGATTAATGGTCGTGGAT |
| | | | TAGTGAGCTTATCTGCACACTCCAA |
| | | | ATCTGCACACTCCAAGTTTAACTAT |
| | | | CTGCTTTCTGAGGACACTCTACTCT |
| | | | CTGAGGACACTCTACTCTGTAAAGG |
| 205225_at | ESR1 | −0.40964831 | ATTGCTGCCTCTATTATGGCACTTC |
| | | | GGCACTTCAATTTTGCACTGTCTTT |
| | | | GTAAATGCTGCCATGTTCCAAACCC |
| | | | GTGTTTAGAGCTGTGCACCCTAGAA |
| | | | ATTATGCCAGTTTCTGTTCTCTCAC |
| | | | TTTTTGTGCACTACATACTCTTCAG |
| | | | GATTAATATGCCCTTTTGCCGATGC |
| | | | TACTGATGTGACTCGGTTTTGTCGC |
| | | | TTTTGTCGCAGCTTTGCTTTGTTTA |
| | | | CACACTTGTAAACCTCTTTTGCACT |
| | | | GATGCTCGAGCACCTGTAAACAATT |
| 219395_at | ESRP2 | 0.660258078 | TGCCAGGGGTGGTCCCACCTAAAGA |
| | | | GATGGACTGTGCTGCAGTATCACCA |
| | | | GTATCACCAGAAGACATTAGGGGGC |
| | | | TAGGGGGCAGTAGGCCCCCACACAA |
| | | | TAAAGGGGAGGACTTTCTGCCAACT |
| | | | GCCTTGGGAAAGCCAGTTGCCCTGA |
| | | | ACACCATGGAATGTCCTTTGCACGC |
| | | | GTCCTTTGCACGCATTAAATGGTAC |
| | | | GGTACAGAACTGAAGCCTCGGAAGC |
| | | | GAAGCCTCGGAAGCAATTTGGAACT |
| | | | TTTGCCCCAAAGTGAGGGGCTCCAC |
| 219268_at | ETNK2 | 0.538626729 | CTCCAAACCAGATCCAATCAAACCT |
| | | | AATCAAACCTCAGCCCGAGGAAACA |
| | | | ACCTCAGCCCGAGGAAACATGCTCC |
| | | | TTGTGCTGTGGCTTAGCCGGAGGGG |
| | | | GCTTAGCCGGAGGGGACGTGGCCAA |
| | | | GCCAAGGGTGAGGTGGCCAAAACCA |
| | | | CTCCAGCTCTACTTTATGTCCTGAA |
| | | | TCCTGAAGCTGACCCGAGGTCTTCC |
| | | | ACCCGAGGTCTTCCTATCTGGAATG |
| | | | GAGGTCTTCCTATCTGGAATGACTA |
| | | | GGAATGACTAGAGGGAGCCAAGAGG |
| 225319_s_at | FAM104A | 0.570273337 | TACCATCTCCCAACTTTTAAAGCCA |
| | | | TTGAGCTTTCAAACACACATGCACA |
| | | | GGAGGATTCCTGCAGGCTTAACAGT |
| | | | GCAGGCTTAACAGTTGGCATCGTAC |
| | | | GGTTGGCAGTTAACTCTTTCACCCT |
| | | | TAACTCTTTCACCCTACTAAATTCA |
| | | | TAAATTCAAGAGCTCATCTCCACCC |
| | | | CACCCTGTCCTGTATATTTTCTACA |
| | | | TACTTGGTAGTGTCAGCGGGCATCT |
| | | | GGCATCTTTTACACCTTCTAGTAGC |
| | | | AGTAAAACCTTGTACTTCTCTATTG |
| 213455_at | FAM114A1 | −0.61972007 | TAAAATCGCCTCACAGATCACACTC |
| | | | GATCACACTCGCTGGTGGCAAATAT |
| | | | ATGGGAGGCTGCACAGAAGACCCTG |
| | | | CAGGAGGGGCATTGTCAGTGGCTGC |
| | | | CCCATGGACATCCCTACAGGTACTG |
| | | | GGTACTGTCATGTGAAGCCTTGCCT |
| | | | TGAAGCCTTGCCTAGTAGTTCTCTC |
| | | | AAACCTCTTATTCACATTTGCTTTG |
| | | | TTTGCTTTGATTCCCCGATGGAGTA |
| | | | AGTAGACTGCCTTTGTTCCATACAG |
| | | | ATATCATCCTACTTCTTATTAGCAT |
| 226697_at | FAM114A1 | −0.45986055 | CACGATGGAGAGAACCGCGCACTAC |
| | | | CGCGCACTACGGGATGCTGTTTGAT |
| | | | ATATCAAGGCTTGTCACACCTGGAA |
| | | | GGAAGCCCTGGAAATTCTGTCCAAT |
| | | | CTCGCATGCTTACAGAGCTTCTCTT |
| | | | GGCCACACCTGACAAACTCAATAAG |
| | | | AAGAGGGCTCATGACTGGGTGGAAG |
| | | | GGAGGCCTTGATGCGTTGGAATTCA |
| | | | GTCCTTGCAGAAAGTGACCCGGGCT |
| | | | TGACCCGGGCTTTAAGCGGACCAAG |
| | | | GAACTGTTTCCTTGTCTCAGATGTT |
| 200767_s_at | FAM120A | −0.38030291 | TGCGGAGCCTTCTCAGGCAGTGACA |
| | | | TAGCAAGTCCCAGGGCGGAGTCCAA |
| | | | CCAACCTATACCTTCTCAGGGAGGC |
| | | | GTGGTTGGCCATTGGGCTGGGAGCA |
| | | | GGTGGTTTCTGTCGGAGGACCAGCT |
| | | | CAAGAGGAGTTATTTCCACCCCAGT |
| | | | AATTCAGGGCAGACCTCCTTATGCT |
| | | | GGGAATCGAAGTCCTCTGCTATGTC |
| | | | TCTGCTATGTCTTCAGACGGGTCCC |
| | | | ATGAACGGGAGCACGGGTGACGCCA |
| | | | CCCAGCCACTCTGAAAGTGCCTTGA |
| 200774_at | FAM120A | −0.52200803 | GACTAATACCATGCATCTGTGATCA |
| | | | GAGCTAAACTTCTGCATGGTTCATA |
| | | | AATATGCATGTTATCGTCCTTTCTT |
| | | | TCTTAACAGTATGTGCCCATTTGCA |
| | | | GTCATTGACTGATCTTGCTCTAACC |
| | | | GTGATTATTGACCTCTGTTGCATTT |
| | | | TTGCATTTATTCTAAAGCCCCCCAA |
| | | | AAATTATCTAGCCGTTTCGAATATC |
| | | | TTCGAATATCAACATTACCCTGGTG |
| | | | TACCCTGGTGTATTCACTGCTGTAT |
| | | | GCTGTATGCATTATTGTTCTTTGTT |
| 227239_at | FAM126A | −0.47305424 | TCTAGTCCTTTAATGAGCATGAATT |
| | | | TATACTTCTACATTTGTTGCTTAGT |
| | | | ATATTGTCTTCTATACTTTGTAACT |
| | | | ATTTCACGTATTGTTGCTTTCTCTT |
| | | | GTTGCTTTCTCTTATATGGAACTTA |
| | | | GGAACTTATTGTGTACCTCTTACCT |
| | | | GTATTCCTAGAGTTTACATTCCTAA |
| | | | ACGACGACTTTGGCTATTTTTGTGT |
| | | | GTTCCCTACCTTCTTAAGGCTATGG |
| | | | ATTTGTGTAAATGTTCTCCATATGT |
| | | | CAAGTGTTGCCTCTTGTTTTATTGA |
| 200894_s_at | FKBP4 | 0.480140894 | TCAACCTGGCCATGTGTCATCTGAA |
| | | | ATCTGAAACTACAGGCCTTCTCTGC |
| | | | CCTTCTCTGCTGCCATTGAAAGCTG |
| | | | AACAAGGCCCTAGAACTGGACAGCA |
| | | | GAATGACTTTGAACTGGCACGGGCT |
| | | | GGCACGGGCTGATTTCCAGAAGGTC |
| | | | TTTCCAGAAGGTCCTGCAGCTCTAC |
| | | | TGTGCCAGCAGCGGATCCGAAGGCA |
| | | | TCCGAAGGCAGCTTGCCCGGGAGAA |
| | | | GAAGAAGCTCTATGCCAATATGTTT |
| | | | ACACGGCAGGGAGCCAGTCTCAGGT |
| 200895_s_at | FKBP4 | 0.467716809 | TGGTTGGATGGTGGCTTTAGGGGAA |
| | | | GTAGGCTGGGGGATTGAGGTGGGGA |
| | | | TCATTTTAGCTGGTGTCAGCCCCTC |
| | | | CCTTCCTCCATTGCACATGAACATA |
| | | | TGTCCATCCATATATATTCATCAGA |
| | | | TGGAGAGGGAGACTCCTGGGCAGCC |
| | | | CATTTCCAAATGTGGCCTCCATGTG |
| | | | CACCCCCGACGGTGTGGCTGATGAT |
| | | | GATGTCTTCTGGTGTCATGGTGACC |
| | | | CTCTTCTCTGCACGTTGCTGAAGGT |
| | | | TGCACGTTGCTGAAGGTCCAGGCTT |
| 229902_at | FLT4 | −0.36328793 | CACTGCGCGTTACTCCAGGATATGC |
| | | | GCGCGTTACTCCAGGATATGCCGAG |
| | | | CTCCAGGATATGCCGAGTGCACGTA |
| | | | GCCGAGTGCACGTATAAGGTCATCT |
| | | | ACGTATAAGGTCATCTTCGTCGTCC |
| | | | TCTGCACGTCGTCCAACGTGGGACT |
| | | | ACGTCGTCCAACGTGGGACTGGCGT |
| | | | GTCCAACGTGGGACTGGCGTGTCGG |
| | | | TCTGCAGAGAACCAGCCTGGCTCCT |
| | | | GCCCAACCATCTCACCAGGAGAAAG |
| | | | CATCTCACCAGGAGAAAGAGCCACA |
| 209189_at | FOS | −0.9207879 | CTGCCCGAGCTGGTGCATTACAGAG |
| | | | GAGAAACACATCTTCCCTAGAGGGT |
| | | | GAGGGTTCCTGTAGACCTAGGGAGG |
| | | | AGGACCTTATCTGTGCGTGAAACAC |
| | | | GTGAAACACACCAGGCTGTGGGCCT |
| | | | GTGTGGACTCAAGTCCTTACCTCTT |
| | | | TCCTTACCTCTTCCGGAGATGTAGC |
| | | | TGTATTGTTCCCAGTGACACTTCAG |
| | | | TTAGTAGCATGTTGAGCCAGGCCTG |
| | | | TCTCCTTAGTCTTCTCATAGCATTA |
| | | | GTGTTCCTGGCAATAGTGTGTTCTG |
| 226072_at | FUK | 0.430111836 | GCCCTTTGAGGCATTCCCTATGGCT |
| | | | TACACTCAACCCTCATGTGAGCGTG |
| | | | TGCCATCCCAGGCCTTAACTAGCAA |
| | | | TACGGAGCGTGCCAAGTGACCTGGT |
| | | | GGAAGTGGGTTCTCAGGACTGGCAT |
| | | | GAAAACCTGGAGCTACAGTGTCCCC |
| | | | GACAGGGGCCTAGATGTAGCCTCTG |
| | | | GGAAGGTCCCAAGCTTAGTATCCCA |
| | | | TTAGTATCCCACGTGGCCTTTACAA |
| | | | ACAAATCCTATGGCTGGCCTTCTCA |
| | | | TTGGCATATGGCTGGGAGTCCCTTA |
| 235340_at | GANC | 0.375634848 | TTCTGTGTGCACTGCATACGCTGCA |
| | | | AGCCGTGGGAGTTATTCTCCCCTAG |
| | | | TCTCCCCTAGAGATCGACTTGGCAG |
| | | | GAAGGATTCTTTTCTCTTTCATGCT |
| | | | TGCTTCTCAGGCTCAATAGTTTCTA |
| | | | GAAATAAATACCCATGTACCCACCA |
| | | | ACCCACCACTGGACTTCAGAAGTAG |
| | | | GGCTGCGTGGGTCTGTTTTAACGTG |
| | | | CATGCAGCATTGGCGCTCTGGCTGC |
| | | | GCAGCAGCTGAGTTGCTCAAGGCCA |
| | | | GCTCAAGGCCAGTGTCCAAGTGGAC |
| 212581_x_at | GAPDH | 0.710511506 | CAAGGTCATCCCTGAGCTGAACGGG |
| | | | GTCCCCACTGCCAACGTGTCAGTGG |
| | | | GTGTCAGTGGTGGACCTGACCTGCC |
| | | | GACCTGCCGTCTAGAAAAACCTGCC |
| | | | ACACTGAGCACCAGGTGGTCTCCTC |
| | | | TCTCCTCTGACTTCAACAGCGACAC |
| | | | TTTGACGCTGGGGCTGGCATTGCCC |
| | | | CGACCACTTTGTCAAGCTCATTTCC |
| | | | GCAACAGGGTGGTGGACCTCATGGC |
| | | | TCCTCACAGTTGCCATGTAGACCCC |
| | | | CGCACCTTGTCATGTACCATCAATA |
| 213453_x_at | GAPDH | 0.746040983 | CAAGGTCATCCCTGAGCTGAACGGG |
| | | | GTGTCAGTGGTGGACCTGACCTGCC |
| | | | GACCTGCCGTCTAGAAAAACCTGCC |
| | | | TGGTGAAGCAGGCGTCGGAGGGCCC |
| | | | ACACTGAGCACCAGGTGGTCTCCTC |
| | | | TCTCCTCTGACTTCAACAGCGACAC |
| | | | TTTGACGCTGGGGCTGGCATTGCCC |
| | | | CGACCACTTTGTCAAGCTCATTTCC |
| | | | GCAACAGGGTGGTGGACCTCATGGC |
| | | | GCCTCCAAGGAGTAAGACCCCTGGA |
| | | | CCCTCCGGGAAACTGTGGCGTGATG |
| 217398_x_at | GAPDH | 0.716676445 | CGACCACTTTGTCAAGCTCATTTCC |
| | | | CAACGAATTTGGCCACACTCAGTCC |
| | | | TCCTCACAGTTGCCATGTAGACCCC |
| | | | CGCACCTTGTCATGTACCATCAATA |
| | | | GGACTCATGACCACAGTCCATGCCA |
| | | | CCCTCCGGGAAACTGTGGCGTGATG |
| | | | CAAGGTCATCCCTGAGCTGAACGGG |
| | | | CACTGCCAACGTGTCGGTGGTGGAC |
| | | | GACCTGCCGTCTAGAAAAACCTGCC |
| | | | ACACTGAGCACCAGGTGGTCTCCTC |
| | | | TCTCCTCTGACTTCAACAGCGACAC |
| AFFX- | GAPDH | 0.695543658 | TCATTTCCTGGTATGACAACGAATT |
| HUMGAPDH/M | | | ACAACGAATTTGGCTACAGCAACAG |
| 33197_3_at | | | GGGTGGTGGACCTCATGGCCCACAT |
| | | | TCATGGCCCACATGGCCTCCAAGGA |
| | | | ACATGGCCTCCAAGGAGTAAGACCC |
| | | | AGGAGTAAGACCCCTGGACCACCAG |
| | | | GCCCCAGCAAGAGCACAAGAGGAAG |
| | | | GAGAGAGACCCTCACTGCTGGGGAG |
| | | | CCTCACTGCTGGGGAGTCCCTGCCA |
| | | | CCTCCTCACAGTTGCCATGTAGACC |
| | | | AGTTGCCATGTAGACCCCTTGAAGA |
| | | | CATGTAGACCCCTTGAAGAGGGGAG |
| | | | TAGGGAGCCGCACCTTGTCATGTAC |
| | | | GCCGCACCTTGTCATGTACCATCAA |
| | | | TGTCATGTACCATCAATAAAGTACC |
| | | | CCTCTGACTTCAACAGCGACACCCA |
| | | | GGGCTGGCATTGCCCTCAACGACCA |
| | | | CCCTCAACGACCACTTTGTCAAGCT |
| | | | ACCACTTTGTCAAGCTCATTTCCTG |
| | | | TTGTCAAGCTCATTTCCTGGTATGA |
| | | | TCATTTCCTGGTATGACAACGAATT |
| | | | ACAACGAATTTGGCTACAGCAACAG |
| | | | GGGTGGTGGACCTCATGGCCCACAT |
| | | | TCATGGCCCACATGGCCTCCAAGGA |
| | | | ACATGGCCTCCAAGGAGTAAGACCC |
| | | | AGGAGTAAGACCCCTGGACCACCAG |
| | | | GCCCCAGCAAGAGCACAAGAGGAAG |
| | | | GAGAGAGACCCTCACTGCTGGGGAG |
| | | | CCTCACTGCTGGGGAGTCCCTGCCA |
| | | | CCTCCTCACAGTTGCCATGTAGACC |
| | | | AGTTGCCATGTAGACCCCTTGAAGA |
| | | | CATGTAGACCCCTTGAAGAGGGGAG |
| | | | TAGGGAGCCGCACCTTGTCATGTAC |
| | | | GCCGCACCTTGTCATGTACCATCAA |
| | | | TGTCATGTACCATCAATAAAGTACC |
| | | | CCTCTGACTTCAACAGCGACACCCA |
| | | | GGGCTGGCATTGCCCTCAACGACCA |
| | | | CCCTCAACGACCACTTTGTCAAGCT |
| | | | ACCACTTTGTCAAGCTCATTTCCTG |
| | | | TTGTCAAGCTCATTTCCTGGTATGA |
| AFFX- | GAPDH | 0.615788823 | GCGCCTGGTCACCAGGGCTGCTTTT |
| HUMGAPDH/M | | | GGTCACCAGGGCTGCTTTTAACTCT |
| 33197_5_at | | | TGCTTTTAACTCTGGTAAAGTGGAT |
| | | | GGATATTGTTGCCATCAATGACCCC |
| | | | CATCAATGACCCCTTCATTGACCTC |
| | | | CTTCATTGACCTCAACTACATGGTT |
| | | | CAACTACATGGTTTACATGTTCCAA |
| | | | GGTTTACATGTTCCAATATGATTCC |
| | | | CCAATATGATTCCACCCATGGCAAA |
| | | | TGATTCCACCCATGGCAAATTCCAT |
| | | | ATTCCATGGCACCGTCAAGGCTGAG |
| | | | TGGCACCGTCAAGGCTGAGAACGGG |
| | | | CATCAATGGAAATCCCATCACCATC |
| | | | TCCCATCACCATCTTCCAGGAGCGA |
| | | | CTTCCAGGAGCGAGATCCCTCCAAA |
| | | | GCGAGATCCCTCCAAAATCAAGTGG |
| | | | CGATGCTGGCGCTGAGTACGTCGTG |
| | | | CGTGGAGTCCACTGGCGTCTTCACC |
| | | | CTTCACCACCATGGAGAAGGCTGGG |
| | | | CGGATTTGGTCGTATTGGGCGCCTG |
| | | | GCGCCTGGTCACCAGGGCTGCTTTT |
| | | | GGTCACCAGGGCTGCTTTTAACTCT |
| | | | TGCTTTTAACTCTGGTAAAGTGGAT |
| | | | GGATATTGTTGCCATCAATGACCCC |
| | | | CATCAATGACCCCTTCATTGACCTC |
| | | | CTTCATTGACCTCAACTACATGGTT |
| | | | CAACTACATGGTTTACATGTTCCAA |
| | | | GGTTTACATGTTCCAATATGATTCC |
| | | | CCAATATGATTCCACCCATGGCAAA |
| | | | TGATTCCACCCATGGCAAATTCCAT |
| | | | ATTCCATGGCACCGTCAAGGCTGAG |
| | | | TGGCACCGTCAAGGCTGAGAACGGG |
| | | | CATCAATGGAAATCCCATCACCATC |
| | | | TCCCATCACCATCTTCCAGGAGCGA |
| | | | CTTCCAGGAGCGAGATCCCTCCAAA |
| | | | GCGAGATCCCTCCAAAATCAAGTGG |
| | | | CGATGCTGGCGCTGAGTACGTCGTG |
| | | | CGTGGAGTCCACTGGCGTCTTCACC |
| | | | CTTCACCACCATGGAGAAGGCTGGG |
| | | | CGGATTTGGTCGTATTGGGCGCCTG |
| AFFX- | GAPDH | 0.680189706 | AAGATCATCAGCAATGCCTCCTGCA |
| HUMGAPDH/M | | | ACCAACTGCTTAGCACCCCTGGCCA |
| 33197_M_at | | | TTAGCACCCCTGGCCAAGGTCATCC |
| | | | GACAACTTTGGTATCGTGGAAGGAC |
| | | | GTGGAAGGACTCATGACCACAGTCC |
| | | | ATCACTGCCACCCAGAAGACTGTGG |
| | | | GCCACCCAGAAGACTGTGGATGGCC |
| | | | CCCTCCGGGAAACTGTGGCGTGATG |
| | | | GGCCGCGGGGCTCTCCAGAACATCA |
| | | | GCCTCTACTGGCGCTGCCAAGGCTG |
| | | | GTGGGCAAGGTCATCCCTGAGCTGA |
| | | | GTCATCCCTGAGCTGAACGGGAAGC |
| | | | GAGCTGAACGGGAAGCTCACTGGCA |
| | | | AAGCTCACTGGCATGGCCTTCCGTG |
| | | | ACTGGCATGGCCTTCCGTGTCCCCA |
| | | | ACTGCCAACGTGTCAGTGGTGGACC |
| | | | AACGTGTCAGTGGTGGACCTGACCT |
| | | | GTGGACCTGACCTGCCGTCTAGAAA |
| | | | CTGACCTGCCGTCTAGAAAAACCTG |
| | | | GAAAAACCTGCCAAATATGATGACA |
| | | | AAGATCATCAGCAATGCCTCCTGCA |
| | | | ACCAACTGCTTAGCACCCCTGGCCA |
| | | | TTAGCACCCCTGGCCAAGGTCATCC |
| | | | GACAACTTTGGTATCGTGGAAGGAC |
| | | | GTGGAAGGACTCATGACCACAGTCC |
| | | | ATCACTGCCACCCAGAAGACTGTGG |
| | | | GCCACCCAGAAGACTGTGGATGGCC |
| | | | CCCTCCGGGAAACTGTGGCGTGATG |
| | | | GGCCGCGGGGCTCTCCAGAACATCA |
| | | | GCCTCTACTGGCGCTGCCAAGGCTG |
| | | | GTGGGCAAGGTCATCCCTGAGCTGA |
| | | | GTCATCCCTGAGCTGAACGGGAAGC |
| | | | GAGCTGAACGGGAAGCTCACTGGCA |
| | | | AAGCTCACTGGCATGGCCTTCCGTG |
| | | | ACTGGCATGGCCTTCCGTGTCCCCA |
| | | | ACTGCCAACGTGTCAGTGGTGGACC |
| | | | AACGTGTCAGTGGTGGACCTGACCT |
| | | | GTGGACCTGACCTGCCGTCTAGAAA |
| | | | CTGACCTGCCGTCTAGAAAAACCTG |
| | | | GAAAAACCTGCCAAATATGATGACA |
| 235310_at | GCET2 | 0.36020273 | CGATCCTTGGAGATCCCGTAATCCC |
| | | | TTTGGAGCCTGATTTCCTACTGACT |
| | | | TTTCCTACTGACTTCCAATTTAGTG |
| | | | TGCTCCCCCAGTATGCTAAATAGAA |
| | | | AATAGAAAGCCCTCTGCAATATATT |
| | | | GATTATTTACTTTCTCTTATCTTTT |
| | | | TTATCTTTTCCTTAGTGTTCCTCAA |
| | | | AAATTATATCTATCCTCTAAACCAG |
| | | | AGGGATCAGCAAACTATAACCCCCA |
| | | | ACTCATTTGTTTACCTACTATCTAT |
| | | | TGACATGGACCATAGGCCCTAAAGA |
| 202321_at | GGPS1 | −0.41410157 | GAGTAGGCATCTTTAATCGCCCTGA |
| | | | GCCTGAGAGGGCCTGACTGAAAAGT |
| | | | TCTGTAGTTTCTACACCCAAGCCAC |
| | | | CACCCAAGCCACTGAAGTCATCTGT |
| | | | AATATTTGATTTGTTGACATCCCAA |
| | | | ACATGTTTTGCTTGGTTCTATAGTA |
| | | | GTTACTTAGGATCTATTTACCATAT |
| | | | GTATGAGAAATCCTCACCCAAGCAT |
| | | | TCACCCAAGCATTCAACCTAAATCT |
| | | | TTGGGTGCTGTCTTTAGTAACTTTT |
| | | | TGAACTTTATGAACCCATACTTTTA |
| 202322_s_at | GGPS1 | −0.46937914 | GATGCACGTGGTGGGAACCCTGAGC |
| | | | GGAACCCTGAGCTAGTAGCCTTAGT |
| | | | AAGCCATTCTTGATTGGACCTCATA |
| | | | TTCATTTAGAAGCCCCTCTGTACAG |
| | | | AAAGCAGCCACAGTTATGTAGGTCT |
| | | | AGTGACAGGACATTGCCACCAACTC |
| | | | AACTCTATCCTACTACCATCAATGT |
| | | | GTTCTCATTTCCTACTATTCATGCT |
| | | | TTGGTCAAGGCCTGAAAGCACCCAG |
| | | | CCAGGTGCAGAATATCTTGCGCCAG |
| | | | GAATACACTCGTAATACCCTTAAAG |
| 206896_s_at | GNG7 | −0.37146828 | TCTCTGTCTCAGGCAGGGCATCATT |
| | | | GGGCATCATTCAGTAATTAGCTCAA |
| | | | CAAACAAAACATCTCAAGTCCCCAA |
| | | | TCCCACCGCCCGGATGGGGTAGAAT |
| | | | AGGGATGGAGGCTTTACGGCCACTT |
| | | | AAAACTCTCGATTGCCGTTTCAATT |
| | | | CCGTTTCAATTGTGGACCGGCGCCG |
| | | | GACTTCGCCCGGTGGCAATAGTTCC |
| | | | GTTCCGGGAGAATTGGCCATTGGTA |
| | | | GACTTCATAGGGTCACTGGAATGCT |
| | | | GGGGCGGGAGGTGACATCATGAAGT |
| 220936_s_at | H2AFJ | 0.477249577 | TTATTGGGCAGGTTCGAGATGTTCT |
| | | | GATGTTCTGCTATTTACTCTGTGGT |
| | | | AATGCCTCATTGTTAGAACTACTAC |
| | | | GAACTACTACTCACAGTTACCACTT |
| | | | CTCACAGTTACCACTTGGGGTCAGT |
| | | | AAAATGGGCATAATAGTTTACCTCA |
| | | | GTGAGGACACTAAGATTCCCATATA |
| | | | GCGGTAGTTGATGGGAGCTGTTGAA |
| | | | GGTAAACAGCATTCTAGCAATCCTT |
| | | | GCAATCCTTCGACTTTTGTGATAGC |
| | | | GGACATCCACAATTCAATGTATAAC |
| 224301_x_at | H2AFJ | 0.591989591 | GAACTACGCGGAGCGAGTGGGCGCC |
| | | | TGTACCTGGCGGCGGTGTTGGAGTA |
| | | | TTACGGCGGAGATCCTGGAGCTGGC |
| | | | AGAAGACCAGGATAATTCCCCGCCA |
| | | | CTCGCCATCCGCAACGACGAGGAGT |
| | | | GCTGGGCAAAGTGACCATCGCTCAG |
| | | | GTGCTGCTGCCCAAGAAGACGGAGA |
| | | | CCCCCAGCAAAGGCCCTTTTCATGG |
| | | | GTCGTCCCGCAATGCTTTTGAATGT |
| | | | GTGCTGGATGTCATGGAGGGCCGGT |
| | | | GACATCTAGCGGGGAGGTGGGCGGC |
| 225245_x_at | H2AFJ | 0.611706619 | GTGATCATGTCCGGTCGCGGGAAAC |
| | | | GAACTACGCGGAGCGAGTGGGCGCC |
| | | | TGTACCTGGCGGCGGTGTTGGAGTA |
| | | | TTACGGCGGAGATCCTGGAGCTGGC |
| | | | AGAAGACCAGGATAATTCCCCGCCA |
| | | | CTCGCCATCCGCAACGACGAGGAGT |
| | | | GCTGGGCAAAGTGACCATCGCTCAG |
| | | | GTGCTGCTGCCCAAGAAGACGGAGA |
| | | | GTCGTCCCGCAATGCTTTTGAATGT |
| | | | GTGCTGGATGTCATGGAGGGCCGGT |
| | | | GACATCTAGCGGGGAGGTGGGCGGC |
| 228213_at | H2AFJ | 0.448371938 | TCCCCGAGGACTGGTCTGTTTAGTT |
| | | | GAGGACTGGTCTGTTTAGTTGTGCC |
| | | | AAAAGGCTTAGTCAGGCCCCATAAT |
| | | | TATGCAAACTTCACAATGCCCCTTC |
| | | | CAATGCCCCTTCCAGTGGTTGAAAG |
| | | | GGTTGAAAGGTCGCATACCATGCTG |
| | | | GTGTAAGAACTTTAGCTCTCTGCAA |
| | | | TTAGCTCTCTGCAATGAGACTTAAA |
| | | | AAATTCAGATTCACTCTACTCCTTA |
| | | | CTCTACTCCTTATTAGTTATCTGAT |
| | | | GAAACTTAATCTCTTTAAACCTCAG |
| 211999_at | H3F3B | 0.441145226 | CTTCTGACTGCACTTGTTCTCATAG |
| | | | ATGCTATGCGCATTTATACCTTGCA |
| | | | TACCTTGCATAAGTCCTCATTCTAC |
| | | | CTCATTCTACCACATGTTAACCCTC |
| | | | GTTAACCCTCTAGCTGATAATGCAA |
| | | | AACGAGTTATTCACACCAGCATCAT |
| | | | CATTGTGTTGTGTGGTTGGTCTCAT |
| | | | ACTAGGTTGAGTTTTTCTCCTCTGC |
| | | | CAGTACCGAAGTTCTTTTTCTTGTG |
| | | | GGGAGGAGCACAAAACTCCAGCCCA |
| | | | CCCACTGAACCTCTGCCAATTAAGA |
| 209069_s_at | H3F3C, | 0.336867187 | GTTGGTGAGGGAGATCGCGCAGGAT |
| | H3F3B | | CCGACCTGAGGTTTCAGAGCGCAGC |
| | | | ATCGGTGCGCTGCAGGAGGCTAGCG |
| | | | GGGTCTGTTCGAAGATACCAACCTG |
| | | | TGTGCCATCCACGCTAAGAGAGTCA |
| | | | CGCTAAGAGAGTCACCATCATGCCC |
| | | | CCCAAAGACATCCAGTTGGCTCGCC |
| | | | TTGGCTCGCCGGATACGGGGAGAGA |
| | | | GAAGGCAGTTTTTATGGCGTTTTGT |
| | | | AGGGATGGGTGATACTTCTTGCTTC |
| | | | ATGTGTACAGGGTCCTTTTGCAATA |
| 227679_at | HDAC11 | 0.465171926 | AGCCCTACTCATGGGGACATTCAGG |
| | | | GGAAGTGGGCGGGGGAGCATCCACC |
| | | | AAGTGGGTCCATTGAGGTGGCCCTG |
| | | | ACCCCGAGGCTCTAACAATGCACTC |
| | | | AACAATGCACTCTGAGATCCCTACC |
| | | | CTGACTCGAGGCACCTAACATCCAT |
| | | | CAACACAGGCCAGCGACTTCTGGGG |
| | | | CATGGTTTGTCACTGTTGAGCTTCT |
| | | | GAGCTTCTGTTCCTAGAGAATCCTA |
| | | | TAGAGGCTTGATTGGCCCAGGCTGC |
| | | | GTAGCGCAAGGCCTGACATGGGTAG |
| 209328_x_at | HIGD2A | 0.426198785 | ACTATAGACTCGAAGGATCCACAAG |
| | | | ACCATCGAAGCCTCCAGTCATTGAG |
| | | | GAAGCCTCCAGTCATTGAGGGGCTG |
| | | | CTCCAGTCATTGAGGGGCTGAGCCC |
| | | | CTCGAAGGATCCACAAGTTTGTACA |
| | | | TGAGGGGCTGAGCCCCACTGTTTAC |
| | | | GAGCCCCACTGTTTACAGGAATCCA |
| | | | TTACAGGAATCCAGAGAGTTTCAAG |
| | | | GCAGGCTTGTAAAACGACGGCCAGT |
| | | | GACGGCCAGTAACTATAACGGTCCT |
| | | | GCCAGTAACTATAACGGTCCTAAGG |
| 207156_at | HIST1H2AG | 0.410568514 | CCGGCCCACTCTGAAGTAATCTTAA |
| | | | TAAGAAGACGTTAACTCATTTTTCT |
| | | | TTTTCTTGTGTATTGTAGACACTTT |
| | | | TGTAGACACTTTTGGCTGTCTGGTA |
| | | | GGCTGTCTGGTAACATGGAAAATCT |
| | | | ACATTACATGATTTGGTGAGCCTAA |
| | | | GTGAGCCTAATTGCTGTTACTAATT |
| | | | AATGTTTCACGATAACTCAGCAATT |
| | | | TCACGATAACTCAGCAATTGTAATG |
| | | | AACATCTAATGTCTTTTGGGTTACA |
| | | | AACAGGTACTGAGATTTGTGGCCTA |
| 208579_x_at | HIST1H2BK | 0.532020648 | AAGCGCAGCCGCAAGGAGAGCTACT |
| | | | GAGAGCTACTCCGTATACGTGTACA |
| | | | CAAGGTGCTGAAGCAGGTCCACCCC |
| | | | GCATCTCCTCTAAGGCCATGGGAAT |
| | | | TGGGAATCATGAACTCCTTCGTCAA |
| | | | TCGTCAACGACATCTTCGAACGCAT |
| | | | TCGAACGCATCGCAGGTGAGGCTTC |
| | | | GCATTACAACAAGCGCTCGACCATC |
| | | | TCGACCATCACCTCCAGGGAGATCC |
| | | | TCACCAAGTACACCAGCGCTAAGTA |
| | | | GAAGGACGGCAGGAAGCGCAAGCGC |
| 209806_at | HIST1H2BK | 0.510579653 | TAAACTTGCCAAGGAGGGACTTTCT |
| | | | ACAATTGCCTTCGGTTACCTCATTA |
| | | | GGTTACCTCATTATCTACTGCAGAA |
| | | | GACGAGAATGCAACCATACCTAGAT |
| | | | ACCTAGATGGACTTTTCCACAAGCT |
| | | | CAAGCTAAAGCTGGCCTCTTGATCT |
| | | | TCCATTCCTTCTCTCTAATAATCAT |
| | | | TACTGTTCCTCAAAGAATTGTCTAC |
| | | | TCTCCTCTTTTGCCTCTGAGAAAGA |
| | | | GGGTAATATTCTGTGGTCCTCAGCC |
| | | | TCCTCAGCCCTGTACCTTAATAAAT |
| 208576_s_at | HIST1H3B | 0.507441215 | ATGGCTCGTACTAAACAGACAGCTC |
| | | | GCTACCAAAAGTCGACCGAGTTGCT |
| | | | AGTCGACCGAGTTGCTGATTCGGAA |
| | | | GTTGCTGATTCGGAAGCTGCCGTTC |
| | | | GAAATCGCCCAAGACTTCAAGACCG |
| | | | GCCCAAGACTTCAAGACCGATCTTC |
| | | | CAGACAGCTCGGAAATCCACCGGCG |
| | | | GGAGGCTTGTGAGGCCTACTTGGTA |
| | | | TGAGGACACAAACCTTTGCGCCATC |
| | | | CGAGTGACTATTATGCCCAAAGACA |
| | | | AATCCACCGGCGGTAAAGCGCCACG |
| 214634_at | HIST1H41 | 0.553652376 | GAGTCTCTTAATAGGGCCATTGTCA |
| | | | ACAGGTGACCTTGGGCCGAGATTTT |
| | | | ACTTCTGGCGGCTGCCTGGAAATTG |
| | | | TGGAAATTGCCTGCAGCCGGTTTAC |
| | | | TAGAAAGCCAAGGGGTCTGCGGTCC |
| | | | GTCTGCGGTCCAAATAGGGGCGGGC |
| | | | GGGCTAGATAATTAACTTCCCTCTG |
| | | | TTCCCTCTGGACCTTCAAATACGTC |
| | | | GGGCTCCACTAAATGCTAGAACCTC |
| | | | GGAGGGGGACAGACCATGCTTTTAC |
| | | | AATGCGCTGGTGACACACCACTTAT |
| 219269_at | HMBOX1 | −0.53153352 | AGGCTAGAAAATCTTGCTGCTCCGT |
| | | | GCTCCGTCTTAGCATTCCAAGAGAG |
| | | | AGATAGCCCTCAGTTCTCAAATATT |
| | | | TTGTAACACTAGTCTGTACTCCCTT |
| | | | TTTTCCTTCCCCAAGACTGATAGGA |
| | | | GGATGCAAGCTGAGGTCGTGGCACA |
| | | | GAATCCCCACCTCAGCGTGAGGATA |
| | | | TAAGCCGTGCCTCATTATAGCCACA |
| | | | GATTATACTTCTTTGGGTGCTGTGC |
| | | | GAAGTTAACATGCCTGACACAGACA |
| | | | AGATAAAATACTGCCTTCTGCCTTT |
| 225504_at | HMBOX1 | −0.80276841 | TGCTGCCTTTCTTCAGATCAGGTTA |
| | | | CAGATCAGGTTACCACAATGCCTCC |
| | | | CCCACTTTGCCGGTGCTAAAACACA |
| | | | GAAAGACAAGCTCCGGGTGTCCAGG |
| | | | TGACGGGCCAACCATGTGGCAGGTC |
| | | | GCTCCACAGTGGTCCCACTAATGGG |
| | | | GGGAGAGTGATACTGCACCTTCACC |
| | | | ACCTTCACCCGTAGGACTCATATTT |
| | | | GTAGCAAAAAGCCCTTGTTTCTAGA |
| | | | AGTCCTGTATCATTGTATCTCCTAT |
| | | | ATCTCCTATTCTGGATTAGTGCCTT |
| 209113_s_at | HMG20B | 0.344160466 | CCCACCCCGTGGACGAGAGGCTGGG |
| | | | TGGACGAGAGGCTGGGGGTCCACCC |
| | | | TTCGATGTTCCCATCTTCACTGAAG |
| | | | TTCACTGAAGAGTTCTTGGACCAAA |
| | | | GGACCAAAACAAAGCGCGTGAGGCG |
| | | | TCGGCGCTTGCGGAAGATGAATGTG |
| | | | TGTGGCCTTCGAGGAGCAGAACGCG |
| | | | AGAACGCGGTACTGCAGAGGCACAC |
| | | | CCAGCACGAGAAGCTCATCGTCCGC |
| | | | GCTCATCGTCCGCATCAAGGAAATC |
| | | | GCCAGCGAGCACCTGTGAGGAGTGG |
| 225107_at | HNRNPA2B1 | −0.40053 | TAATTCTAGTTCAGTGTCTTACCCT |
| | | | GTTCAGTGTCTTACCCTGAAGAGAA |
| | | | GAGAAAGTTGTAGGTTGGCTGTTGA |
| | | | TGGCTGTTGAAATTCATTCCTTAGA |
| | | | GATATGATCAGTTTGATTGCCCGGC |
| | | | TTGATTGCCCGGCTTTATTGCCTTT |
| | | | GGAATGTGATACTCAGGGCTTACTC |
| | | | CAGGGCTTACTCTATACACCAATGA |
| | | | ACACCAATGAGTCTTCTTTGATCCT |
| | | | AAGACCACCACTGAAGTTGTTTAGG |
| | | | GATAAACTTCTTCAGATACTTTTTT |
| 225932_s_at | HNRNPA2B1 | −0.39306534 | ACCATGGACAAGTATATTCTGCTGC |
| | | | TGGACAAGTATATTCTGCTGCCACA |
| | | | GCCACAAAGACTGTAAAGTGCTTCA |
| | | | AGTGCTTCATTTCAACAGCTGAGGC |
| | | | TCATTTCAACAGCTGAGGCAAGCCA |
| | | | GAGGCAAGCCAAGTGATCATTAATA |
| | | | TAAAGCTTTTCTTGGTTCCTTCAGT |
| | | | TCCTTCAGTGGTGTTGGTAGTAAAA |
| | | | GTGGTCAACCACAGAGTCTTCAAGA |
| | | | GAAAGTAGTTCTTGTTGGTGCCTTC |
| | | | GTTCTTGTTGGTGCCTTCATTTAAA |
| 210086_at | HR | 0.353065176 | ACCACTCTGGGCACAAGCAGGGCAC |
| | | | CCCTTAAGCCAACAACCACAGTGCC |
| | | | CCAGGCCCGCACTGGGGGCAATTGA |
| | | | TCCGAGACCCAGGAGACAAACAGCC |
| | | | GGGGAAACTTGGGAATCATTCTGGC |
| | | | ATTCTGGCTTAAACAACACCTCCTC |
| | | | GGCTCACTGCAGGCATGCTGAACAA |
| | | | GGCATGCTGAACAAGGGGCCTCCAA |
| | | | GAGAGGGTGGCATCAGGAGCTGCTC |
| | | | GCATGGGCGATGTCACTCATGCCCT |
| | | | TCCCTCCTTCATGATTTCCATTAAA |
| 220163_s_at | HR | 0.376939592 | CACCGGGCACAGAAAGACTTCCTTT |
| | | | CCAGGTCAGCACTGTGTGGCACGTG |
| | | | CCCCAGGCAGCTGCTACCTGGATGC |
| | | | TGCTACCTGGATGCAGGGCTGCGGC |
| | | | GGTGCAGGGCCTGGTGAGCACAGTC |
| | | | TGGTGAGCACAGTCAGCGTCACTCA |
| | | | CCACCTGCTTTATGCCCAGATGGAC |
| | | | GAAGGTGGCCGTGGGGACATTACAG |
| | | | GATGCTAGGTGTCTGGGATCGGGGT |
| | | | GTGGGGACAGGTAGACCAGGTGCTC |
| | | | GCCCAGGCACAACTTCAGCAGGGGA |
| 200064_at | HSP90AB1 | 0.702960924 | AATAGACTTGTGTCTTCACCTTGCT |
| | | | GTCTTCACCTTGCTGCATTGTGACC |
| | | | GTGACCAGCACCTACGGCTGGACAG |
| | | | GAGCGGATCATGAAAGCCCAGGCAC |
| | | | AAAAGCACCTGGAGATCAACCCTGA |
| | | | TGGTGGTGCTGCTGTTTGAAACCGC |
| | | | CAACCGCATCTATCGCATGATCAAG |
| | | | GCAGAGGAACCCAATGCTGCAGTTC |
| | | | TCCCCCCTCTCGAGGGCGATGAGGA |
| | | | GGGCGATGAGGATGCGTCTCGCATG |
| | | | AACTTGTGCCCTTGTATAGTGTCCC |
| | | | AATAGACTTGTGTCTTCACCTTGCT |
| | | | GTCTTCACCTTGCTGCATTGTGACC |
| | | | GTGACCAGCACCTACGGCTGGACAG |
| | | | GAGCGGATCATGAAAGCCCAGGCAC |
| | | | AAAAGCACCTGGAGATCAACCCTGA |
| | | | TGGTGGTGCTGCTGTTTGAAACCGC |
| | | | CAACCGCATCTATCGCATGATCAAG |
| | | | GCAGAGGAACCCAATGCTGCAGTTC |
| | | | TCCCCCCTCTCGAGGGCGATGAGGA |
| | | | GGGCGATGAGGATGCGTCTCGCATG |
| | | | AACTTGTGCCCTTGTATAGTGTCCC |
| 214359_s_at | HSP90AB1 | 0.545555043 | CATACCTCCCAGTCTGGAGATGAGA |
| | | | ATCTCTGTCAGAGTATGTTTCTCGC |
| | | | ATGTTTCTCGCATGAAGGAGACACA |
| | | | GGAGACACAGAAGTCCATCTATTAC |
| | | | GAAGTCCATCTATTACATCACTGGT |
| | | | CCATCTATTACATCACTGGTGAGAG |
| | | | GGTGAGAGCAAAGAGCAGGTGGCCA |
| | | | AAGAGCAGGTGGCCAACTCAGCTTT |
| | | | CCCTGCTGGTGTCTAGTGTTTTTTT |
| | | | AATCTCAAGCTTGGAATCCACGAAG |
| | | | GGAATCCACGAAGACTCCACTAACC |
| 221667_s_at | HSPB8 | 0.486202313 | GGGACTTAACATTTCACGTTGTATC |
| | | | ACGTTGTATCTTACTTGCAGTGAAT |
| | | | TGCAAGGGTTACTTTTCTCTGGGGA |
| | | | CCATGCCGCATGGTTTGGTTAATGA |
| | | | GCTTCCACATGCCTGGCCTAAAATG |
| | | | ATACAGGTCTTATATCCCCATATGG |
| | | | TGGAATTTATCCATCAACCACATAA |
| | | | TCAAAGTTTCCACATTAGCACTCCC |
| | | | TAAGGACGCTGGGAGCCTGTCAGTT |
| | | | GTTTATGATCTGACCTAGGTCCCCC |
| | | | TATGGGCGGGACGTGTGTGTCATTA |
| 204949_at | ICAM3 | 0.480810421 | GTACCCCGAGCTGCGGTGTTTGAAG |
| | | | CTCCAGCCGGGAGGTGCCGGTGGGG |
| | | | TCCCGTTCTTCGTCAACGTAACACA |
| | | | TGGTACTTATCAGTGCCAAGCGTCC |
| | | | AGCGTCCAGCTCACGAGGCAAATAC |
| | | | GGGCGTGGTGACTATCGTACTGGCC |
| | | | AATGTACGTCTTCAGGGAGCACCAA |
| | | | ACCAACGGAGCGGCAGTTACCATGT |
| | | | TAGGGAGGAGAGCACCTATCTGCCC |
| | | | TCACGTCTATGCAGCCGACAGAAGC |
| | | | ATTCCGCACCAATAAAGCCTTCAAA |
| 202069_s_at | IDH3A | 0.731202774 | CAGTCACTCTAAATGGACACCACAT |
| | | | TGGACACCACATGAACCTCTGTTTA |
| | | | ACCTCTGTTTAGAATACCTACGTAT |
| | | | GTATGCATTGGTTTGCTTGTTTCTT |
| | | | TTGCTTGTTTCTTGACAGTACATTT |
| | | | TTAGATCTGGCCTTTTCTTAACAAA |
| | | | GATGCAGGTGGATGTCCCTAGGTCT |
| | | | CAAAGAACTTTTTCCAAGTGCTTGT |
| | | | GAGTGGACTGTATCATTTGCTATTC |
| | | | GCACAAAATGACACTCTTCTAAAAC |
| | | | TGGGCACAAGAGAATTTTCCTGGGA |
| 202070_s_at | IDH3A | 0.909136128 | ATCCCAAAGCACCAATTACTGCCCT |
| | | | CCTCTGCCTCAGCAGTACCAGTATA |
| | | | GACTGGAGGCAACTCAGCCTGAGTT |
| | | | GAGCTTGAGCTTGGGCTTAGGCTTG |
| | | | TAGGCTTGGGCTCAGCTTTTGACCC |
| | | | ATCTTCAGACACTCACTATTTTCAT |
| | | | TCCCCACAACCAAAGACAACTCATG |
| | | | TCCTTTGGCCCTTGTGTAACATTGC |
| | | | GGCTTTGCAAAATGTACCCAGGTCA |
| | | | TTTAGCAATGATATCCCTGTCTGGG |
| | | | CCTGTCTGGGTCACTTTTTAAGCTT |
| 201508_at | IGFBP4 | −0.68950982 | AGAGACATGTACCTTGACCATCGTC |
| | | | CTTCCTCTCAAGCTAGCCCAGAGGG |
| | | | TAATGGTCACGAGGTCCAGACCCAC |
| | | | CCCAAAGCTCAGACTTGCCAGGCTC |
| | | | GTCCTTCCTTTAGGTCTGGTTGTTG |
| | | | CCATCTGCTTGGTTGGCTGGCAGCT |
| | | | GGAGAAGACCCACGTGCTAGGGGAT |
| | | | GCTAGGGGATGAGGGGCTTCCTGGG |
| | | | ACCCCATTTGTGGTCACAGCCATGA |
| | | | TCACCGGGATGAACCTATCCTTCCA |
| | | | GGCATCTTCTGGCTTGACTGGATGG |
| 203710_at | ITPR1 | −0.39512527 | CTCCGTCTCCTAGTGATAATGCTCC |
| | | | TAATGCTCCAAGTCTATGAACTGTT |
| | | | GGGAACTTTCTATGCAATGTTCAGG |
| | | | GGATAAATCGATACTGCTGGCCAAT |
| | | | CGATACTGCTGGCCAATCAGTGTCA |
| | | | TCTCCTGGGTAAATTTTGATGTCGC |
| | | | TTCTTCATCTGAACCAACATGCTAC |
| | | | TGACCACAGACATGTTATTCTTCTG |
| | | | GAAAGAGCCACATTTTGGTTTTATT |
| | | | TGAAATCTTTTATATCTGTTGCCTA |
| | | | ATCTGTTGCCTAGTTTTGTACATGG |
| 227514_at | ITPRIPL2 | −0.56159871 | GAAATATTTCTAGCAGTGTCAGTGA |
| | | | GTAACATACTGTTCTTGTAGTTTTT |
| | | | CAGGTTAATTACCCAAAGCCTCATC |
| | | | GCCATGCTGAGCAATTGTTCTCTGT |
| | | | TGTTCTCTGTACATGGTAACCAAAA |
| | | | GCCAGGCATGATGGTTGCCCAAGAC |
| | | | ATGGTTGCCCAAGACAGTTAAATTA |
| | | | AATTCTGTATTTTATTAGGGCTCTG |
| | | | TTAGGGCTCTGTTATGTCCTTCATC |
| | | | CTCTGTTATGTCCTTCATCTGAAAT |
| | | | GGTGTATGCTTGGTACTGGAGATTC |
| 227792_at | ITPRIPL2 | −0.59300408 | ATTTTTTTATACCTACATAGCACAT |
| | | | TGAAGTATCTACTATTCTGGAATAT |
| | | | GGTGCCTTGATTCAGTTGCGTGACT |
| | | | GCGTGACTTAGAACATTCATCCTAT |
| | | | TGTTTTTGGTTGCAGTCTGGCGGCT |
| | | | GCAGGCATAGCGTCGGTTTTGTTCC |
| | | | CAGATATGGTTCAGCTGCTACAATT |
| | | | ACAGTCAAGACCTGCCATTCGTTTT |
| | | | CATTCGTTTTCTCTTGCAGGTTGGA |
| | | | TTGCACTTTGAATCATGTGGGTCAT |
| | | | ATGTGGGTCATTTGGGGACCTTGTT |
| 227954_at | ITPRIPL2 | −0.46044034 | GGAAAGGCAATCGAGAGTTGGTTAG |
| | | | GATCAATTCACTCATTTTGTGGTAA |
| | | | AGGGAAGCCAGTTATATTTATTATT |
| | | | GTTCTGTGTAGACGGATTCTGTAGA |
| | | | GGATGTGGCTTTTAGAGAAGTCCAG |
| | | | GAAGCAAGAACTAGCTGCAGGGAAA |
| | | | GCAGGGAAAGTTCCTTCTGTCGGTT |
| | | | TTTAGACACAGATCTCTCTGCCCAA |
| | | | CAGATCTCTCTGCCCAAATTAAAAA |
| | | | GACACAATTACTTGCTAGGTACTGG |
| | | | GGTACTGGGTTCCTGATTGTCTTTA |
| 212492_s_at | KDM4B | −0.68721271 | GAGGAGGAGCTGCCCAAGAGGGTCC |
| | | | TGCCACGGAGGACTCCGGGCGGAGC |
| | | | ACCCCACTCAACTACTCAGAATTTT |
| | | | TAAACCATGTAAGCTCTCTTCTTCT |
| | | | GCTCTCTTCTTCTCGAAAAGGTGCT |
| | | | AAAAGGTGCTACTGCAATGCCCTAC |
| | | | TACTGCAATGCCCTACTGAGCAACC |
| | | | GCCCTACTGAGCAACCTTTGAGATT |
| | | | CTTTGAGATTGTCACTTCTGTACAT |
| | | | TGTCACTTCTGTACATAAACCACCT |
| | | | AAACCACCTTTGTGAGGCTCTTTCT |
| 212495_at | KDM4B | −0.66054335 | TAAAAGAGTGTCCTAACAGTCCCCG |
| | | | TCCTAACAGTCCCCGGGCTAGAGAG |
| | | | AACAGTCCCCGGGCTAGAGAGGACT |
| | | | TCCCCGGGCTAGAGAGGACTAAGGA |
| | | | GAGAGTGTTACGCAGGAGCAAGCCT |
| | | | GTGTTACGCAGGAGCAAGCCTTTCA |
| | | | AAAACGTGGAGGTGTCCCTCTGCAC |
| | | | CGTGGCGCTGACACTGTATTCTTAT |
| | | | GGCGCTGACACTGTATTCTTATGTT |
| | | | CACTGTATTCTTATGTTGTTTGAAA |
| | | | TGTAAAGAAGCGGGCGGGTGCCCCT |
| 212496_s_at | KDM4B | −0.71421129 | CAGAAGGGCAGGCCGGAGCTGCACA |
| | | | TCTCTGTGTCTTACTCTGTGCAAAG |
| | | | GTGTCTTACTCTGTGCAAAGACGCG |
| | | | CTTACTCTGTGCAAAGACGCGGCAA |
| | | | GCAAAGACGCGGCAAAACCCAGTGC |
| | | | CAAAGACGCGGCAAAACCCAGTGCC |
| | | | CCCACCCGAGATGAAGGATACGCTG |
| | | | GGATACGCTGTATTTTTTGCCTAAT |
| | | | ACGCTGTATTTTTTGCCTAATGTCC |
| | | | GTCCCTGCCTCTAGGTTCATAATGA |
| | | | TCCCTGCCTCTAGGTTCATAATGAA |
| 215616_s_at | KDM4B | −0.59551407 | CCAGGCCCTTCTGGTTGGTAGTGAG |
| | | | GCCCTTCTGGTTGGTAGTGAGTGTG |
| | | | TAGTGAGTGTGGACAGCTTCCCAGC |
| | | | CAGCTCTTCGGGTACAACCCTGAGC |
| | | | GGTACAACCCTGAGCAGGTCGGGGG |
| | | | CTGAGCAGGTCGGGGGACACAGGGC |
| | | | CCTGCTTCCGGGCAGGGACGAGGCC |
| | | | CTGCTGTCACCTGAGGGGAATCTGC |
| | | | GGAATCTGCTTCTTAGGAGTGGGTT |
| | | | GGAGTGGGTTGAGCTGATAGAGAAA |
| | | | GAGAAAAAACGGCCTTCAGCCCAGG |
| 202386_s_at | KIAA0430 | −0.75937109 | TGGACTTCAGTTCTGCTAGCATGTA |
| | | | GCTAGCATGTAAAGAGTGGTGGACT |
| | | | GTATCATTACAAGTCACCTGGAACA |
| | | | GAACAGGTTCTTTGGGCAACAGACA |
| | | | CTGTCCCGTGAGTGTGTCTGAGTAC |
| | | | GTGTGTCTGAGTACCATTCACTGGA |
| | | | TTCACTGGAGTTGCTGCTTAGGTCT |
| | | | TGTGACTCTTAACAATTGCTGTCTG |
| | | | GCACATTGTGTTCATAATGTACTCC |
| | | | TAATGTACTCCACAATGGCCAGTCC |
| | | | GCCAGTCCAATTGCTATCTATTTTT |
| 225623_at | KIAA1737 | −0.69265964 | TGTTCTCTGTTGGAGCTGTAAGCAG |
| | | | GGAAGGAGAGATCCATTGAGTCCAG |
| | | | GAGTCCAGAAGCCAGATCAGCAAAT |
| | | | GACCAGAAAGATCTCCATCGGTTGC |
| | | | CATCGGTTGCCCAAGGCTGTAAGTA |
| | | | GTAGTGATGGTTTTAGCGATGAATA |
| | | | ATTGGCTATGAAGTACTGTGGCAGA |
| | | | GAGAAGCCATTTTTAGCTCAGAGCA |
| | | | GAACTTTTGGCAGATTTTGTTGGCA |
| | | | TTATTACACTCATTGGTTTTTATTG |
| | | | TTTCTACTATGGTTCCTTTAGCAGA |
| 209008_x_at | KRT8 | 0.370951507 | GAGCAGCGTGGAGAGCTGGCCATTA |
| | | | AGGATGCCAACGCCAAGTTGTCCGA |
| | | | GGGCCAAGCAGGACATGGCGCGGCA |
| | | | CGGCAGCTGCGTGAGTACCAGGAGC |
| | | | TCGCCACCTACAGGAAGCTGCTGGA |
| | | | GCGGCTATGCAGGTGGTCTGAGCTC |
| | | | TCCTCCAGGGCCGTGGTTGTGAAGA |
| | | | TGGGAAGCTGGTGTCTGAGTCCTCT |
| | | | GCCCAAGTGAACAGCTGCGGCAGCC |
| | | | TGAACCGGAACATCAGCCGGCTCCA |
| | | | GCCGGCTCCAGGCTGAGATTGAGGG |
| 208029_s_at | LAPTM4B | 0.594307186 | ATTTTCTCCATGGCCTGAATTAAGA |
| | | | AAGACCATTAGAAAGCACCAGGCCG |
| | | | CTGACTGTTCTTGTGGATCTTGTGT |
| | | | TGTGGATCTTGTGTCCAGGGACATG |
| | | | ACATGGGGTGACATGCCTCGTATGT |
| | | | GTGACATGCCTCGTATGTGTTAGAG |
| | | | GTGGAATGGATGTGTTTGGCGCTGC |
| | | | TTGGCGCTGCATGGGATCTGGTGCC |
| | | | TGCCCTAGATTGGTTCAAGGAGGTC |
| | | | GGTTCAAGGAGGTCATCCAACTGAC |
| | | | GAGGTCATCCAACTGACTTTATCAA |
| 208767_s_at | LAPTM4B | 0.592105853 | GTAGAATTCTTCCTGTACGATTGGG |
| | | | TTCACTAACCTTCCCTAGGCATTGA |
| | | | AACTTCCCCCAAATCTGATGGACCT |
| | | | GGACCTAGAAGTCTGCTTTTGTACC |
| | | | TCTGTTCCCTCTCTTTTGAAAATGT |
| | | | GGGTTACTTGATTAGCTGTGTTTGG |
| | | | TGGAACTGCTACCGATACATCAATG |
| | | | ACTCCTCTGATGTCCTGGTTTATGT |
| | | | GCAATGACACTACGGTGCTGCTACC |
| | | | TGCCACTGTGAATGGTGCTGCCAAG |
| | | | GTCTGCCTAAGCCTTCAAGTGGGCG |
| 214039_s_at | LAPTM4B | 0.63024599 | ATATTTGATATACTTCTGCCTAACA |
| | | | TATACTTCTGCCTAACAACATGGAA |
| | | | CATCCTACTGCTTTGAACTTCCAAG |
| | | | GAACTTCCAAGTATGTCTAGTCACC |
| | | | CCAAGTATGTCTAGTCACCTTTTAA |
| | | | GAAAAATGAGGATTGCCTTCCTTGT |
| | | | TCCTTGTATGCGCTTTTTACCTTGA |
| | | | TTTTTACCTTGACTACCTGAATTGC |
| | | | GACTACCTGAATTGCAAGGGATTTT |
| | | | GTTACAAAGTCAGCAACTCTCCTGT |
| | | | ACTCTCCTGTTGGTTCATTATTGAA |
| 221558_s_at | LEF1 | −0.37358809 | AGCTTGTCTGGTAAGTGGCTTCTCT |
| | | | TGTAACACATAGTGGCTTCTCCGCC |
| | | | CTTCTCCGCCCTTGTAAGGTGTTCA |
| | | | CAAACCCCACTCTGTTGGTAGCAAT |
| | | | GTAGCAATTGGCAGCCCTATTTCAG |
| | | | AAACCTTAACAGATGCGTTCAGCAG |
| | | | CGTTCAGCAGACTGGTTTGCAGTGA |
| | | | AGCCCAGCACTTGAATTGTTATTAC |
| | | | TGAGCATTGATGTACCCATTTTTTA |
| | | | ACTGTCATCCTAACGTTTGTCATTC |
| | | | AACGTTTGTCATTCCAGTTTGAGTT |
| 218939_at | LETM1 | 0.681360884 | GCTCCTTCAGCAAGCAGGCTAGTCA |
| | | | TGGGGCTTCAAGGGCAATACCCCCG |
| | | | GCAATACCCCCGTGCTTAGGGTTTG |
| | | | GGTTCCTGGCAAAAATGTACCTCCA |
| | | | TCCAGGGGCCTCCAAGCATAGGATT |
| | | | GAAGACAGGAACGGCACAGGCGTCC |
| | | | GAAAGCAGCTGCACTCAGACAATGC |
| | | | AATGCCTTCTCCATTACTTGAAGCT |
| | | | CTTGAAGCTTCTTTCTGTTCAGCCA |
| | | | ACCTTTGTGCAGGGACAGTTGGCTT |
| | | | GGCTTCCAGAGGTTTCAGCTTTCAG |
| 222006_at | LETM1 | 0.446584363 | GATTACGGGCAAGTTTTTATTAGAG |
| | | | ACTCTCAGTTCTAACGCAGGGATTC |
| | | | GATTCAGGAATTGGGCTTTCAGACT |
| | | | TCCTTCTGCAGTGTCACAGTCCAGA |
| | | | GCAGTGTCACAGTCCAGACTTTTTT |
| | | | CACAGTGGGTCCCAGGGCTAGCAGG |
| | | | TCCCAGGGCTAGCAGGAGCGTGCTG |
| | | | GGTGCTGGCAGGAGTGTGCTGGTGA |
| | | | GGCAGGAGTGTGCTGGTGAGCCGGC |
| | | | GCTCTGTCTTTGTAAATCCTTCAGG |
| | | | TGTCTTTGTAAATCCTTCAGGGGTC |
| 208450_at | LGALS2 | 0.461084643 | ATCGCCGATGGCACTGATGGCTTTG |
| | | | GACAAGCTGAACCTGCATTTCAACC |
| | | | TTCAGCGAATCCACCATTGTCTGCA |
| | | | ATTGTCTGCAACTCATTGGACGGCA |
| | | | GCAACTGGGGGCAAGAACAACGGGA |
| | | | GGAGCTGTCACCATGACGGGGGAAC |
| | | | GCCAGATGGGCACGAGCTGACTTTT |
| | | | GAGCTACCTGAGCGTAAGGGGCGGG |
| | | | TAAGGGGCGGGTTCAACATGTCCTC |
| | | | GACATGAAGCCGGGGTCAACCCTGA |
| | | | GAAGATCACAGGCAGCATCGCCGAT |
| 213526_s_at | LIN37 | 0.517736033 | GAGGAGGGCTCAGAGGTAACCAACA |
| | | | GGTAACCAACAGCAAGAGTCGTGAT |
| | | | GTCGTGATGTGTACAAGCTGCCGCC |
| | | | CACACTCATCTATCGCAACATGCAG |
| | | | ATCTATCGCAACATGCAGCGCTGGA |
| | | | CATGCAGCGCTGGAAACGCATCCGC |
| | | | AAACGCATCCGCCAGAGGTGGAAGG |
| | | | AGCTTCGTTACTCAGAAAGCATGAA |
| | | | GAAAGCATGAAGATCCTACGAGAGA |
| | | | GATCCTACGAGAGATGTACGAACGA |
| | | | ACGAGAGATGTACGAACGACAGTGA |
| 203518_at | LYST | −0.6194195 | TTCCAAAGTCTCTGCTGTCAAGATA |
| | | | GATTCGAGAGAAAGCACGTGGCCAT |
| | | | ACGTGGCCATGTATGCTTTAACCTT |
| | | | ACATGTAGTGATACCTAGGCTGCAT |
| | | | TAGGCTGCATTTAGATCACCGTGTG |
| | | | ATCACCGTGTGCTCAGGCCAGGTGT |
| | | | GAATCCTGAGGTCCATGGAGGTGCA |
| | | | GAGATTACTCCTATTCACGTTGAAG |
| | | | ATAGGGTTGCTACTCATCTTTTTTT |
| | | | GCTCTGTTACCTTTATATACGCTGC |
| | | | TATACGCTGCCTCTTCAATTTGGAA |
| 210943_s_at | LYST | −0.42037139 | GAGCTAACCCTTCTTTTGAGAATAT |
| | | | AAGTGATACTACTATGAGCCCTTCA |
| | | | TATGAGCCCTTCACAGTATCTAACC |
| | | | CAGTATCTAACCTTCCCTTTACTGC |
| | | | CTTTACTGCACGCTCCAAATTTAAG |
| | | | AGAGCACGAGTTTCACGGAGCAAGA |
| | | | GGCTGATAGAGAGAGTTTTCCCCAT |
| | | | GCTGCTTTCATCTTGGCACATAGCC |
| | | | CACCTGCCGTTGCTGGGGCAAAACT |
| | | | CTGCTGGCCACACCTATCAGAAGGT |
| | | | AGTGTTTCCCTGTGGTTTAATGTGG |
| 204970_s_at | MAFG | 0.587513144 | GCTGGGAAGGATTCACTCTCTTTAG |
| | | | ACTCTCTTTAGCCCCAGGGGAGCAG |
| | | | TGAAGAGATGGGCTCTGCTCTGAGA |
| | | | GTAGGGCGGGCTTGAAGGCCCTGAT |
| | | | GGCCCTGATGGGTGGACCACCAGCC |
| | | | CTGACCCGTTGCACTGAACAAGACC |
| | | | CTGGTTGTGCGCTTAACGTGAGGGT |
| | | | AACGTGAGGGTGGGTCCAGTGTGCC |
| | | | GGTCCCGTGTCACTGTTTACATGAC |
| | | | GTGTGGTTATATAGCCCTTTATTTA |
| | | | TTGTAAACTTACGGACACCTCTTTG |
| 224466_s_at | MAFG | 0.46668662 | GAGGTGGGTCCAAGCAGAGTTGATC |
| | | | AGCAGAGTTGATCAGTCCCTGCCTG |
| | | | TGCCCTGCCTAGGTCTAGCCAGGGG |
| | | | GAGAAGACCCCGGGATCTGCTGGGG |
| | | | TGGATGCGGGGTGAGGCCCGAGCGC |
| | | | CGCTCACACTTCGTGTAGGGCGGGC |
| | | | CTGCCCTGCGCAGTATTTATTGCTA |
| | | | ATTATTGTCCAGGAGGGGCAGCACT |
| | | | TCTGCTAGTCCCTGAAGCCTTTAAC |
| | | | TGAAGCCTTTAACCAAACGGGAGTG |
| | | | AACAGGACAAGGGCTGCCCGCGTGT |
| 203668_at | MAN2C1 | −0.4312488 | CCACGAGTTCACCTATGCACTGATG |
| | | | CGCACAAGGGCTCTTTCCAGGATGC |
| | | | GGATGCTGGCGTTATCCAAGCTGCC |
| | | | AAGCTGCCTACAGCCTAAACTTCCC |
| | | | TTCACCCGCGGTCGTATTGGAGACC |
| | | | CCTGAGGCTGTATGAGGCCCACGGC |
| | | | CGGCAGCCACGTGGACTGCTGGCTG |
| | | | TCTGCGATCTCTTGGAGCGACCAGA |
| | | | CTCTGGGGACTCCTAATTTCTGCTT |
| | | | GCTTCCCCAGCCTAAAGCAGGGATC |
| | | | AGCAGGGATCAGTCTTTTCTTGTGG |
| 226132_s_at | MANEAL | 0.579062432 | TGGAAGGGTGTCAGGGTCTGGGCTC |
| | | | ATCATCTGTCTTCTCTAAGTTAGGG |
| | | | AGGAAATCATCCTGAGCACTCACAG |
| | | | GAGCACTCACAGGTTCATTTAACAC |
| | | | TTTAACACTCACTCATCAAGCACCT |
| | | | GAAGAGTTCCTGTCCTGAAGCTTCC |
| | | | TCTGGTGTGGCCTTGTAGCTAGTGC |
| | | | GTGCCTGGGCACAGGTGTTTTTCTT |
| | | | GTTTTACCTAGTGCTGGGAGTTCAG |
| | | | TGGGAGTTCAGTTCTTTTTCCTCTA |
| | | | AGAGCCTAATTTTTCCCAGATGCAT |
| 210058_at | MAPK13 | 0.453157102 | GGGTCCTTCTCCTTATGTGGGAAAT |
| | | | GTCGGTTGGGAGAAACTAGCTCTGA |
| | | | CTAGCTCTGATCCTAACAGGCCACG |
| | | | ACAGGCCACGTTAAACTGCCCATCT |
| | | | AAACTGCCCATCTGGAGAATCGCCT |
| | | | CTGGAGAATCGCCTGCAGGTGGGGC |
| | | | GGATGCTCTAACGAATTACCACAAA |
| | | | TTCCCCAGCTTATTGCTGCATCACT |
| | | | GTTCTCTCCTCTTTTAACAACAGTC |
| | | | CCCACCCTAATCCTGTGTGATCTTA |
| | | | GTGTGATCTTATCTTGATCCTTATT |
| 210059_s_at | MAPK13 | 0.449684703 | CCGGGGGCCTATGGCAGTGATGCTG |
| | | | GGGGCCTATGGCAGTGATGCTGTGT |
| | | | CCTATGGCAGTGATGCTGTGTTGGT |
| | | | CAAACCTGGTGGATTGAAACAGCAG |
| | | | GAAACAGCAGAACTTGATTCCCTTA |
| | | | AGCAGAACTTGATTCCCTTACAGTT |
| | | | CAGGGCTGTGGTCCCTTTGAAGGCT |
| | | | CCTTGGCTCTTTTTAGCTTGTGGCG |
| | | | TGGCTCTTTTTAGCTTGTGGCGGCA |
| | | | TTAGCTTGTGGCGGCAGTGGGCAGT |
| | | | TGATCCTTATTAATTAAACCTGCAA |
| 203928_x_at | MAPT | −0.7271058 | GAGTCCAGTCGAAGATTGGGTCCCT |
| | | | TCCCTGGACAATATCACCCACGTCC |
| | | | AAGACAGACCACGGGGCGGAGATCG |
| | | | CGGAGATCGTGTACAAGTCGCCAGT |
| | | | AGTCGCCAGTGGTGTCTGGGGACAC |
| | | | TCCACCGGCAGCATCGACATGGTAG |
| | | | GCTAGCTGACGAGGTGTCTGCCTCC |
| | | | GCCTCCCTGGCCAAGCAGGGTTTGT |
| | | | TGTGATCAGGCCCCTGGGGCGGTCA |
| | | | GCTCCTCGCAGTTCGGTTAATTGGT |
| | | | ATCACTTAACCTGCTTTTGTCACTC |
| 203929_s_at | MAPT | −0.74252419 | CAGGCTGGGTGTCTTGGTTGTCAGT |
| | | | GGATGGAAGGGCAAGGCACCCAGGG |
| | | | ATGGAAGGGCAAGGCACCCAGGGCA |
| | | | CTGCTCAGCTCCACATGCATAGTAT |
| | | | CTCAGCTCCACATGCATAGTATCAG |
| | | | GCTCCACATGCATAGTATCAGCCCT |
| | | | TCCACACCCGACAAAGGGGAACACA |
| | | | AGTTGTAGTTGGATTTGTCTGTTTA |
| | | | GTTGGATTTGTCTGTTTATGCTTGG |
| | | | GATTTGTCTGTTTATGCTTGGATTC |
| | | | TGTCTGTTTATGCTTGGATTCACCA |
| 203930_s_at | MAPT | −0.5823235 | GCCTGGCAGGAGGGTTGGCACTTCG |
| | | | GACTGACCTTGATGTCTTGAGAGCG |
| | | | TTGATGTCTTGAGAGCGCTGGCCTC |
| | | | TCTGAAGGTTGGAACTGCTGCCATG |
| | | | ACTGCTGCCATGATTTTGGCCACTT |
| | | | CCACTTTGCAGACCTGGGACTTTAG |
| | | | GCAGACCTGGGACTTTAGGGCTAAC |
| | | | TAGGGCTAACCAGTTCTCTTTGTAA |
| | | | ACCAGTTCTCTTTGTAAGGACTTGT |
| | | | TAAGGACTTGTGCCTCTTGGGAGAC |
| | | | GCATCTCTGGAGTGTGTGGGGGTCT |
| 206401_s_at | MAPT | −0.75694157 | GCAGCATCGACATGGTAGACTCGCC |
| | | | GCTAGCTGACGAGGTGTCTGCCTCC |
| | | | AGGTGGCAGTGGTCCGTACTCCACC |
| | | | GTCCAAGATCGGCTCCACTGAGAAC |
| | | | ACTGAGAACCTGAAGCACCAGCCGG |
| | | | GACCTGAGCAAGGTGACCTCCAAGT |
| | | | GGCTCATTAGGCAACATCCATCATA |
| | | | GAGTCCAGTCGAAGATTGGGTCCCT |
| | | | TCCCTGGACAATATCACCCACGTCC |
| | | | CGGAGATCGTGTACAAGTCGCCAGT |
| | | | AGTCGCCAGTGGTGTCTGGGGACAC |
| 225379_at | MAPT | −0.68822477 | TATGGACATCTGGTTGCTTTGGCCT |
| | | | TCAGGGGTCCTAAGCCCACAATCAT |
| | | | TCATGCCTCCCTAAGACCTTGGCAT |
| | | | GCTCCAGACACACAGCCTGTGCTTT |
| | | | TTGGAGCTGAGATCACTCGCTTCAC |
| | | | TCCTCATCTTTGTTCTCCAAGTAAA |
| | | | GTAAAGCCACGAGGTCGGGGCGAGG |
| | | | GCAGAGGTGATCACCTGCGTGTCCC |
| | | | GCCTCACCTCCTAATAGACTTAGCC |
| | | | GAGCAGGACTATTTCTGGCACTTGC |
| | | | GCAAGTCCCATGATTTCTTCGGTAA |
| 200978_at | MDH1 | 0.502702999 | TTTCCTCTGCCTGACTAGACAATGA |
| | | | GAATTTGTCACGACTGTGCAGCAGC |
| | | | GCTGCTGTCATCAAGGCTCGAAAAC |
| | | | AAACTATCCAGTGCCATGTCTGCTG |
| | | | CTGCAAAAGCCATCTGTGACCACGT |
| | | | GTGACCACGTCAGGGACATCTGGTT |
| | | | GTTTGTGTCCATGGGTGTTATCTCT |
| | | | TGATGGCAACTCCTATGGTGTTCCT |
| | | | TCCTGATGATCTGCTCTACTCATTC |
| | | | CTACTCATTCCCTGTTGTAATCAAG |
| | | | AAGGTCTCCCTATTAATGATTTCTC |
| 217542_at | MDM2 | 0.35395489 | AGTTTTTAGTTGCGCTTTATGGGTG |
| | | | TGCGCTTTATGGGTGGATGCTGAAT |
| | | | GTGATCATATTGTCTACCATGTAGC |
| | | | GTCTACCATGTAGCCAGCTTTCAAT |
| | | | GTAGCCAGCTTTCAATTATATGTAA |
| | | | TAAGAGGGACTTTTTGACATTTACA |
| | | | GATATCTGAAAGCACCAGCACTTGG |
| | | | GCAAGCAGATGGGAGGCGTGTTCAG |
| | | | GAGGCGTGTTCAGTAACTTATTCAT |
| | | | GAAATGATTGCTGTACTCAAATATT |
| | | | GAAAACCATAGTTGATTGCCTACAC |
| 238733_at | MDM2 | 0.353767856 | ACTTCTGCTTAAGAGGCTTCTATGT |
| | | | GGTACCTGTAATTTAGCCATTTCCT |
| | | | AGATGTAAGCTTGAGCCCATCCTCT |
| | | | GACTGTTAGTTTTCCAGTTCCTACT |
| | | | CAGTTCCTACTGGAGGCAAATTCTT |
| | | | GGCAAATTCTTTGTTTACCACTGTT |
| | | | GTTTACCACTGTTCTCTGTATTTCA |
| | | | AAAAGCCTTCTCTATATATCAGTAT |
| | | | GGGATGGTACGAGGCTGTATTATTT |
| | | | GAAATGGTCCCATAGCTTAGCATGT |
| | | | CCAGAAGGCATACTTTCCATCCATC |
| 244616_x_at | MDM2 | 0.571340098 | AAAAACTGGCTTTAAAGCAGGAGCT |
| | | | GGCCCCTAAGCCAGACGGGGACTAG |
| | | | AAGCCAGACGGGGACTAGCTTTGGC |
| | | | TGAGACGGAGTCTTGCTCTGTGGCT |
| | | | GCTCTGTGGCTCAGGCTGGAGTACA |
| | | | CTCCTGGCTGTGTTCAAGTGGTTCT |
| | | | AGCTGGGGTTAGAGCACCCTGTCAC |
| | | | CGCCCCGCTAATTTTGTATTTCTAG |
| | | | GATGAAGTTTCACTATGTTGGCCAG |
| | | | TAGTGTGTAGGTCTGTAGGCTTTTG |
| | | | TGTAGGCTTTTGATGGTAACCACAA |
| 210492_at | MFAP3L | 0.374647241 | GATCTCATCTTGTCTTGTTTTTCTA |
| | | | GTCTTGTTTTTCTAAGGCAGGAGAG |
| | | | TTTTTTTCCCTCATTGACACAGAAG |
| | | | TTTCCCTCATTGACACAGAAGACAA |
| | | | GACAAACACAGAAGTCTTTTTAAAG |
| | | | AATACATCCAATACATTATAGAGAC |
| | | | CATGGAGATGGCTGGAATAAACAAT |
| | | | ATAAACAGGAGCTTTGGAGCCAGCA |
| | | | GAGCCAGCACCCGTGATGTTAGTTC |
| | | | CACCCGTGATGTTAGTTCTTCTCAT |
| | | | GATGTTAGTTCTTCTCATGCAAATG |
| 207289_at | MMP25 | 0.354567436 | CCCCTCAAACTTCTGTGCACAAAGT |
| | | | TTCTGTGCACAAAGTGCTCCCTTCC |
| | | | GCCCCATCGGTGTGTAAGGTGGCCT |
| | | | CGGTGTGTAAGGTGGCCTATTCCTC |
| | | | TGTGTAAGGTGGCCTATTCCTCTGT |
| | | | GCCATGCTGACTGAGTGACTGGAGA |
| | | | CATGCTGACTGAGTGACTGGAGACA |
| | | | GACTGGAGACAGGGATGATGGAGAG |
| | | | GACAGGGATGATGGAGAGTTCATGA |
| | | | GCAGCAACTCTATGGTAGGGGGAGA |
| | | | ATGGTAGGGGGAGAGGGACCTGCCG |
| 207890_s_at | MMP25 | 0.563908849 | TCCTGGGAGGCCTTAGCTCTAGAGT |
| | | | CCACTCCCCACAGTTTTAGGATCTA |
| | | | GAACTATTCTTCTAGACTATCCCAC |
| | | | AGACTATCCCACATCAGAATCACTG |
| | | | GAATCCTCACTCAGGGTGGGGTCAG |
| | | | AATCTGCATTTTAACTAGTCGCGGG |
| | | | TAGTCGCGGGGATTGTGGGGGGCAG |
| | | | TCCACCCCAGGACCAATATGTTCAG |
| | | | GATGGCCTGAACCCCATGGGTAGAG |
| | | | TAGAGTCACTTAGGGGCCACTTCCT |
| | | | TAAGTTGCTGTCCAGCCTCAGTGAC |
| 218212_s_at | MOCS2 | 0.341587102 | GTGGTAGACATGTCCTTCCATGACT |
| | | | TCCTTCCATGACTAATTTCTAATTG |
| | | | CCCTCCTCAGTGACTTTAACTAGCT |
| | | | TAACTAGCTCAGAAACGTACTCCCC |
| | | | GTTCTGGGAGAGCATTGTTATTAAG |
| | | | GACAGTCTTGATATTATACATTTTC |
| | | | GAGTGCTTTTGGGCATCCAACAGTT |
| | | | GGCATCCAACAGTTAATCACTTATG |
| | | | TTTAGAGCATGCAATCTTAACTTTG |
| | | | TTTTCTCTCCACATCAGGATAGTTT |
| | | | ACTGAAGCACAATCTCTTATACTAG |
| 203801_at | MRPS14 | −0.6674614 | GAAGGCCTGAACTAACATTGTGGTA |
| | | | GATGGTTCTCTGGGTTCCTGATAAA |
| | | | AGGGCAATTCCAAGAGGGCAACTCC |
| | | | TTCAGGTTCCAGTCATGCGGTGTTG |
| | | | CGGTGTTGGAGATGCCTGTGTCATC |
| | | | GATGAAGACTAGTACGCAGCTGGAT |
| | | | GCAGCTGGATAGCAGAGTCCGAAAC |
| | | | GAATGTTCTAGCTAATATCTCAACT |
| | | | ACTTAGAATCCATCTCACTACCAAT |
| | | | TACCAATGGGCAAACACTTGTGTTC |
| | | | GTTTGAACATTTTGTGTACTTCCAA |
| 205614_x_at | MST1P9 | −0.40471778 | GCATGGAGAGCCAAGCCTACAGCGG |
| | | | TACAGCGGGTCCCAGTAGCCAAGAT |
| | | | CCTGCCCCCTGAATGGTATGTGGTG |
| | | | GTGCCTCCAGGGACCAAGTGTGAGA |
| | | | GGCCTTTCTGAATGTTATCTCCAAC |
| | | | TGCACTGAGGGACTGTTGGCCCCTG |
| | | | TGTGAGGGTGACTACGGGGGCCCAC |
| | | | GCTTTACCCACAACTGCTGGGTCCT |
| | | | TAATCCCCAACCGAGTATGCGCAAG |
| | | | TCACGCGTGTCTCTGTGTTTGTGGA |
| | | | TTAGGCCCAGCCTTGATGCCATATG |
| 213380_x_at | MST1P9 | −0.41073975 | CATGGAGAGCCAGGCCTACAGCGGG |
| | | | TACAGCGGGTCCCAGTAGCCAAGAT |
| | | | TAGCCAAGATGCTGTGTGGGCCCTC |
| | | | AAATGTGGCCTTGCTGAACGTCATC |
| | | | GAACGTCATCTCCAACCAGGAGTGT |
| | | | TGCACTGAGGGACTGTTGGCCCCTG |
| | | | GCTTTACCCACAACTGCTGGGTCCT |
| | | | GAATTAGAATCCCCAACCGAGTATG |
| | | | TCACGCGTGTCTCTGTGTTTGTGGA |
| | | | GAGACTGGGTTAGGCCCAGCCTTGA |
| | | | GCCTTGACGCCATATGCTTTGGGGA |
| 216320_x_at | MST1P9 | −0.46303812 | GCATGGAGAGCCAAGCCTACAGCGG |
| | | | TACAGCGGGTCCCAGTAGCCAAGAT |
| | | | CCTGCCCCCTGAATGGTATGTGGTG |
| | | | GTGCCTCCAGGGACCAAGTGTGAGA |
| | | | ATGTGGCCTTGCTGAATGTCATCTC |
| | | | TGCACTGAGGGACTGTTGGCCCCTG |
| | | | TGTGAGGGTGACTACGGGGGCCCAC |
| | | | GCTTTACCCACAACTGCTGGGTCCT |
| | | | TAATCCCCAACCGAGTATGCGCAAG |
| | | | TCACGCGTGTCTCTGTGTTTGTGGA |
| | | | TTAGGCCCAGCCTTGATGCCATATG |
| 201710_at | MYBL2 | 1.012936028 | CCCCTATGTCCAGTGCCTGGAAGAC |
| | | | ATGCAGGAGAAAGCCCGGCAGCTCC |
| | | | GACCCTCATCTTGTCCTGAGGTGTT |
| | | | TGAGGTGTTGAGGGTGTCACGAGCC |
| | | | GGTTGTGGGGGCAGAGGGGGTCTGT |
| | | | GGGTCTGTGAATCTGAGAGTCATTC |
| | | | CATTCAGGTGACCTCCTGCAGGGAG |
| | | | CCAGACTCTCAGGTGGAGGCAACAG |
| | | | GAGGCAACAGGGCCATGTGCTGCCC |
| | | | CGGCTCCTGGTGCTAACAACAAAGT |
| | | | AGACCCTGCTTAGGATGGGGGATGT |
| 218966_at | MYO5C | −0.60491631 | TCTTACCTGCCAACATATTCACCAT |
| | | | GCAACCTAAATTACTTTCGCTCTCT |
| | | | ACTTTCGCTCTCTAATCAGCATTTC |
| | | | ATTGTGTCGGACCCTACTTTTGAGA |
| | | | TGGGAACTGGCTATTCCTTGTCCCG |
| | | | TTGATAAGCACTCCTAGTCTCTGGC |
| | | | TAGTCTCTGGCCTGTGGATCCAGTG |
| | | | TGGATCCAGTGCTATTCTGTCACCA |
| | | | AAGAATCCCAATTGCACCTTCTGTT |
| | | | GCACCTTCTGTTTCTGACAGTCACA |
| | | | GCATCACCCTGCTAATACATAATAA |
| 209177_at | NDUFAF3 | 0.475161982 | TCTCGCCGGCGGATGACGAGCTGTA |
| | | | CGAGCTGTATCAGCGGACGCGCATC |
| | | | GAGGCCGCTCAGGCAATGTACATCG |
| | | | AACAGCCGCGGCTTCATGATAAACG |
| | | | TCCCGCACTCGGTGGTGCAGTGGAA |
| | | | ACATCACCGAAGACAGCTTTTCCCT |
| | | | GTTGCTGGAGCCCCGGATAGAGATC |
| | | | TGGAGACCGGACCGAGAGGCTGCAG |
| | | | CAGGAGGGACTTCACTTACATCTTT |
| | | | CAAGCTGCTCAATGAACCGCCAGGA |
| | | | CCGCCAGGAACTGACCTGCTGACTG |
| 222992_s_at | NDUFB9 | 0.731413576 | GTTGCGGCTTTATAAGCGGGCGCTA |
| | | | TCGAGTCGTGGTGCGTCCAGAGAGA |
| | | | AATACCGATACTTTGCTTGTTTGAT |
| | | | TGGGGGCACCTCCTATGAGAGATAC |
| | | | GAGATACGATTGCTACAAGGTCCCA |
| | | | GGTGCTTAGATGACTGGCATCCTTC |
| | | | AATGTATCCTGATTACTTTGCCAAG |
| | | | TGGTCCTTTAACTGAAGCTTTGCCC |
| | | | GATTTGCCCCCACTGTGGTGGTATA |
| | | | GTGGTATATTGTGACCAGACCCCGG |
| | | | GAGAGAGACCTCATCTTTCATGCTT |
| 203189_s_at | NDUFS8 | 0.664297427 | GTATGTGAACATGCAGGATCCCGAG |
| | | | GAACATGCAGGATCCCGAGATGGAC |
| | | | ATGCAGGATCCCGAGATGGACATGA |
| | | | GGATCCCGAGATGGACATGAAGTCA |
| | | | GAGATGGACATGAAGTCAGTGACTG |
| | | | GAAGTCAGTGACTGACCGGGCAGCC |
| | | | CCATCAACTACCCGTTCGAGAAGGG |
| | | | GTACCCATCCGGGGAGGAGCGTTGC |
| | | | CCCATCCGGGGAGGAGCGTTGCATT |
| | | | CATCCGGGGAGGAGCGTTGCATTGC |
| | | | AGGAGCGTTGCATTGCCTGCAAGCT |
| 203190_at | NDUFS8 | 0.518954457 | GCAGCCACCTACAAGTATGTGAACA |
| | | | CATCACCATCGAGGCTGAGCCAAGA |
| | | | GAGCCAAGAGCTGATGGCAGCCGCC |
| | | | CCCGCTATGACATCGACATGACCAA |
| | | | TGACCAAGTGCATCTACTGCGGCTT |
| | | | CCAACTTTGAGTTCTCCACGGAGAC |
| | | | TCCACGGAGACCCATGAGGAGCTGC |
| | | | GTTGCTCAACAACGGGGACAAGTGG |
| | | | GGGACAAGTGGGAGGCCGAGATCGC |
| | | | CCAACATCCAGGCTGACTACTTGTA |
| | | | CTGACTACTTGTATCGGTGACGCCC |
| 219438_at | NKAIN1 | 0.519264977 | ACTGCCTGGTGCGTCCATAGAGAGA |
| | | | GAACTGGGGGGCACCCAGATGGTGC |
| | | | TGCAGATGGTTTGCACACCTGAGCC |
| | | | CATTCCCTACTCTCTAAGGCCAAAA |
| | | | CACCATCCCAAATGCAAGCAGCCAG |
| | | | GGTGGGTACAGCTTGAGAGGGGGGC |
| | | | GCTTGAGAGGGGGGCAGCTCCCTCA |
| | | | ACTCAACGGGTGTAGCCACTGGTGC |
| | | | GCCACTGGTGCTTTGAAGCCTTTTG |
| | | | GACCAGGTTCTCTTTTCACTGGGAC |
| | | | CTCTTTTCACTGGGACCTTGCAAGG |
| 224010_at | NPB | 0.358813063 | CACACCGGATCCCTGATGTCTAGGG |
| | | | TCTAGGGAAGAGTCTTCTAGGTCCC |
| | | | CCTCCTGCCCTTGATCAAGAGACCA |
| | | | TCAAGAGACCAGTTCACTACTCAGA |
| | | | AGTTCACTACTCAGATGCACGTCTC |
| | | | TCCTTGGTGCCTTGACCATTCATGT |
| | | | TGGTGCCTTGACCATTCATGTGACC |
| | | | ATTCATGTGACCTTTTTGGCATCAC |
| | | | AGATCAAGTGTCTGCAGATGGGCCC |
| | | | CTGCAGATGGGCCCAGGGCCTGTAG |
| | | | GCCCAGGGCCTGTAGGCAAGGTGCC |
| 226414_s_at | NPB | 0.810447359 | TAAGTGCTGGAACGGCGTGGCCACT |
| | | | GCTCTGGGTGGCCAACGATGAGAAC |
| | | | ATGAGAACTGTGGCATCTGCAGGAT |
| | | | CATGCATTGCATCCTCAAGTGGCTG |
| | | | CAAGTGGCTGCACGCACAGCAGGTG |
| | | | TCTCGCTGGAGGGGCATCCTGAGAC |
| | | | CGCCCCTGAGCTGCAACAAGGTGGA |
| | | | GGGCTGGAGCTGCGTTTGTTTTGCC |
| | | | GTTTTGCCATCACTATGTTGACACT |
| | | | CACTATGTTGACACTTTTATCCAAT |
| | | | AAACTCATTAAACTACTCAAATCTT |
| 223381_at | NUF2 | 0.549670355 | GAGGTGCTGTCTATGAACGAGTAAC |
| | | | ACTGCTTTGGAGAAATACCACGACG |
| | | | ACCACGACGGTATTGAAAAGGCAGC |
| | | | GGCAGCAGAGGACTCCTATGCTAAG |
| | | | AGATGTTCAAAATGTCAACCTGATT |
| | | | ATGTCTTTTTGTAAATGGCTTGCCA |
| | | | TGGCTTGCCATCTTTTAATTTTCTA |
| | | | AATAATGTTGGCTTCATCAGTTTTT |
| | | | TCATCAGTTTTTATACACTCTCATA |
| | | | AATAACTTGTGCAGCTATTCATGTC |
| | | | TACTCTGCCCCTTGTTGTAAATAGT |
| 213075_at | OLFML2A | −0.45525209 | GGGAGCCCTGGGTTGGAATCCAGCC |
| | | | CCACCTCTTTTATGCCACAGGTTTG |
| | | | TCTCCCGCTCAGGGTAGGGCTGTGA |
| | | | TGAACTCCCTCTTACAGCTAAGAAC |
| | | | ATTATTCCTCCCCATTACAGGTGAT |
| | | | GAGAGCTTAAGCAACCTGCTCAGGG |
| | | | GTCACGTCTCCAACAGGCAGTAGAG |
| | | | GTTTTTGTACCAGAGTCCCAGACTA |
| | | | CCAATTGTGCTGAGTCTCCTACTAG |
| | | | CTAGACTCGCTTCATTCTAGCTTTC |
| | | | TCTAGCTTTCTGCTTTTACCTTTAC |
| 200897_s_at | PALLD | −0.70844818 | CTCTCTTAGCTCAGTTACTCAATTC |
| | | | ATCTGTGTACCACCCCATATATTTC |
| | | | TTCACATGTACAGCTTTCTACTTCT |
| | | | GAGCACCGGGTGGCAGATGTTCTAT |
| | | | GATGTTCTATGCAGTGTGGTTCAAG |
| | | | GTGGTTCAAGTTTCTTTGACCGCAC |
| | | | TTGACCGCACTTATATGCATTGCTA |
| | | | AAGATACCATACACAGTCTCTCATG |
| | | | TCTCTCATGGACCTATCTCTATTGT |
| | | | ATGTGACCTTTTTTTGCTGATTTGC |
| | | | TTAACTAGCATTATTTTGCCACCTT |
| 200906_s_at | PALLD | −0.72710984 | GTTGCTGATGGGTACCCAGTGCGGC |
| | | | CAGTGCGGCTGGAATGTCGTGTATT |
| | | | GTCGTGTATTGGGAGTGCCACCACC |
| | | | GTGCCACCACCTCAGATATTTTGGA |
| | | | GACCGAGTGAGCATGCACCAGGACA |
| | | | TGCCTGCTCATTCAGGGAGCCACAA |
| | | | AGGCTGGACGTTTACACCCAGTGGC |
| | | | GCATCAGCAGTCACAGAGCACCAAG |
| | | | CAGCACTTTCGGACCAGGGACTAGA |
| | | | TCAAAGCAGCGTTCCAACCTGAGGC |
| | | | GCCATTGCCTTGACCAACATATTCC |
| 200907_s_at | PALLD | −0.72999637 | AAACACTGCCATTCACAAGTCAAGG |
| | | | GGAACCCAGGGCCAGCTGGAAGTGT |
| | | | GTGGAGCACACATGCTGTGGAGCAC |
| | | | GCTGTGGAGCACACATGCTGTGGAG |
| | | | GCAGTGTGTCTGAGGTTTGTGTAGT |
| | | | GAAATTGCCTGTAGCATCTAGTCTA |
| | | | AAATTATTAGTTCACTTCCCTGCTG |
| | | | TGCTGCCATGAAACTTTGCCTTAAG |
| | | | GAAGGTGCTGGATTCCAAGGTTTGT |
| | | | AAGGCATCTCGGTAAAGACTGCTTT |
| | | | GACTGAGTTGATTCTGACCAGACTT |
| 209796_s_at | PAN2 | 0.441449841 | TGGAGCGACCCCATTACGCTAAAGA |
| | | | GAGCGACCCCATTACGCTAAAGATG |
| | | | GACCCCATTACGCTAAAGATGAAAG |
| | | | GAGCCAGGATCTCCACTGTGGAGCA |
| | | | GAATGGGAAATTGCCCAGGTGGACC |
| | | | ACCCCAAGAAGACCATTCAGATGGG |
| | | | GACCATTCAGATGGGATCTTTCCGG |
| | | | GATGGGATCTTTCCGGATCAATCCA |
| | | | GGATCTTTCCGGATCAATCCAGATG |
| | | | TTTCCGGATCAATCCAGATGGCAGC |
| | | | TCCAGATGGCAGCCAGTCAGTGGTG |
| 241867_at | PARP6 | −0.46940482 | CTCAGTCTTCCTGGCTTATGTCTTA |
| | | | GGCTTATGTCTTAGTTCATTTTCAG |
| | | | TTTTCAGTCTGCTTTTGTGCTTGTT |
| | | | GTGCTTGTTTGATGTAGTCTCTGTA |
| | | | AGTCTCTGTACAAGGTATAGTCACC |
| | | | GTCACCATGTAGTTGCATGTTCACT |
| | | | AAGGGGATTGTGCTAGATTCTTAAT |
| | | | AAAATGTAGTGCCATCAGGAGGCTG |
| | | | AGATGAGGTCCAGATTCTAATCAGG |
| | | | GAAAGTGCCAGAATCAGAGGCCTAA |
| | | | GATTTAGAGTTCTCTCAGTCTTCCT |
| 207838_x_at | PBXIP1 | −0.51747417 | GGGACTAAGGACAGCCATGACCCCC |
| | | | GCAGGAGGGCTTGACTTTCTTTGGC |
| | | | TTCTTTGGCACAGAGCTAGCCCCAG |
| | | | TAGCCCCAGTGCGGCAACAGGAGCT |
| | | | AAGAACATACTTGGCACGGCTGCCC |
| | | | GTGAGGATGGCATCTTCCGTCATGA |
| | | | CGCCTCCGATTCCGGGATTTTGTGG |
| | | | GACTTTGAGGACTTCATCTTCAGCC |
| | | | ATCTTCAGCCACTTCTTTGGAGACA |
| | | | AGCACTCACAGAGCCCAAGAGCTGC |
| | | | CCCACAGGGAATGGCCTTGGCCTTG |
| 212259_s_at | PBXIP1 | −0.58424221 | CAGCGTTATCTAACTCCTGGAGGGT |
| | | | TCCTGGAGGGTGGACTCTGTCCTGG |
| | | | GTTTGGTGTCCTCAGATATCTTTCA |
| | | | AGTAGAGCAAAATCACCAGCCCTGC |
| | | | CCCTGCACTGATGTCACTTTATGTA |
| | | | GGGGTCTGGGGAAGGCAATCTGATT |
| | | | GAGCTTTCATCCTCTTGAGTGTATG |
| | | | GAGTGTATGTCCCCATAGTGGGCCC |
| | | | CCAGCACGAGGACTTACCCTGGGGT |
| | | | GTTAGGTTTGGAAGCAGCTGTCCCT |
| | | | GCAGCTGTCCCTAGGGGGTGAAGTC |
| 214177_s_at | PBXIP1 | −0.5947096 | GTGGTTTCTAAGCACAGGGGACACC |
| | | | ACACCCCCTGCCTGAATGGATGGGT |
| | | | ATGGATGGGTCCATCCCAGGCACTG |
| | | | AACCCTAGGCCCTTGAGAAGCTGAT |
| | | | GAAGCTGATACTTCTCCTTTTGCTC |
| | | | CCCACCCCTGGGAGATGTAGCAAAT |
| | | | GTGGGTTTTGGAGTCTGAGCCTCAG |
| | | | CTGAGCCTCAGGCTCAAATCCAGGC |
| | | | GGCAAGTTAATCTCTGGGAACTTTG |
| | | | TCTCTGGGAACTTTGGGTTTCTTAT |
| | | | GTTTCTTATCCTCAAAAAAGGCGAT |
| 209577_at | PCYT2 | 0.40739165 | GGGAGCGCGATGGTGACTTCTAACC |
| | | | GGTGACTTCTAACCTGGCAGAGGCC |
| | | | TTGGACATAGGACTCTGCAGGGCCG |
| | | | GCCTACAAGGTGCCTGGTTTGCAGC |
| | | | CCGCTCTTTCCAGCAAAGCTGCTCA |
| | | | GCTGCTCAGAGAGGGTGTCCAGCAC |
| | | | GTGTCCAGCACAGTGGAGAGGCCGG |
| | | | GAAGTGAGACGGGCAGACGGCACCT |
| | | | GGTCACCCCTTTAGTTCTCTGGGTG |
| | | | TCTCTGGGTGTAGACCACACCACCT |
| | | | AGCGCCTGGCTCCAGGAAAACACGC |
| 230044_at | PCYT2 | 0.468900214 | CGGCCCCGTAGCAGCATTGGAGGCC |
| | | | GTAGCAGCATTGGAGGCCAGAGCCC |
| | | | GCGGAGGGAGAACCTACCCATCTCC |
| | | | TCTGGGGAGGCATGCTCTGGGCCTC |
| | | | AGAAGGGATGGGGGCAAGAGGAAGG |
| | | | CCCTCACAGATTTGGCTCTCGAGTT |
| | | | CACAGATTTGGCTCTCGAGTTGGGG |
| | | | GATTTGGCTCTCGAGTTGGGGAGCG |
| | | | GTTGGGGAGCGAAGGGCTGGGGGAG |
| | | | TTCTCATACCCAGGCTTGGGGATTT |
| | | | ATACCCAGGCTTGGGGATTTCCAGG |
| 222394_at | PDCD6IP | −0.51106369 | GATCTAAGAGAACTCTCCCTGTGCC |
| | | | GAAAAACAGTCACATGTCACGACAA |
| | | | GTCACGACAAACCAATCAATCTTTA |
| | | | TGAGATATTCCTGTATCCATACCCC |
| | | | GGATTTCACAGAGCCTTGTGTCCCT |
| | | | CACAGAGCCTTGTGTCCCTAAAGTT |
| | | | CCTAAAGTTCTGTCCCAGTCAGCAG |
| | | | GTCCCAGTCAGCAGTCTTTATAGTC |
| | | | GCAGTCTTTATAGTCCAAACAGATT |
| | | | CTTGAAGAATCTTGCTACAGCCAAA |
| | | | AAACCCTGCTAGGTAGTGTTATAAT |
| 219043_s_at | PDCL3 | 0.6367364 | TCATCTTGCACCTTTACAAACAAGG |
| | | | TGCACCTTTACAAACAAGGAATTCC |
| | | | ATCAAAGCCATTTCAACAACCTGCA |
| | | | AAGCCATTTCAACAACCTGCATACC |
| | | | TTCAACAACCTGCATACCCAATTAT |
| | | | CGATATTTGTTTACCTGGAAGGAGA |
| | | | GATATCAAGGCTCAGTTTATTGGTC |
| | | | AAGGCTCAGTTTATTGGTCCTCTGG |
| | | | CTCAGTTTATTGGTCCTCTGGTGTT |
| | | | AAACTGTCTGAATCTGGAGCAATTA |
| | | | CTGTCTGAATCTGGAGCAATTATGA |
| 219575_s_at | PDF | 0.576226091 | AAGGTGGGGTAATTGCATTCGTCTG |
| | | | TCTGCAGTAGACACGAGTTCCTCGG |
| | | | TCCTCGGACCTGTATAATCTCCCAA |
| | | | GGGCTGGACCCCAATGGAGAACAGG |
| | | | TCCAGCACGAGATGGACCACCTGCA |
| | | | ATGGACAGCAGGACGTTCACAAACG |
| | | | GCTTTGCTACTGGGGCTGAGGATTC |
| | | | GAGGATTCCGGATACCAAGACGCAA |
| | | | AAACACTTTCACTTTGAGCTGGGCA |
| | | | GAGCTGGGCAAATCTTACTTGGCAT |
| | | | TCAACTTGGATGGCTCGCATATGAC |
| 205380_at | PDZK1 | −0.51406251 | GTCAAACCATGACTCGCACATGGCA |
| | | | AAAGAACGGGCCCACAGTACAGCCT |
| | | | ATTTGATAGCTGTTTCTGGGTATTT |
| | | | GTGACCTGTTTACTGTCTCTTTAGA |
| | | | TCACCATGTGTGACTGTCTTCTGTT |
| | | | TTATCATTTGTCTTACAGGCGGCTA |
| | | | TACAGGCGGCTATTGCAGACGGCTA |
| | | | GATTTTTTTCATGTGATCTTTTCCA |
| | | | TTCCAAGCTTCAACTTAACTTAACT |
| | | | GTATGATGATGTCTCTTACTTCTAC |
| | | | TTACTTCTACAGGTTCCTTGAGCAC |
| 202464_s_at | PFKFB3 | −0.75010603 | TATTCTGTCCTGAGACCACGGGCAA |
| | | | TGTCCTGAGACCACGGGCAAAGCTC |
| | | | TTATTATTTTGATAGCAGATGTGCT |
| | | | GAGCCTCCTATGTGTGACTTATGAC |
| | | | TCTCTGTGTTCTGTGTATTTGTCTG |
| | | | GTGTTCTGTGTATTTGTCTGAATTA |
| | | | TTGTCTGAATTAATGACCTGGGATA |
| | | | GACCTGGGATATAAAGCTATGCTAG |
| | | | GCTATGCTAGCTTTCAAACAGGAGA |
| | | | GTATATTTTGCAGTTGCCAGACCAA |
| | | | GCAGTTGCCAGACCAATAAAATACC |
| 208305_at | PGR | −0.66800313 | GATGGAGATCCTACAAACACGTCAG |
| | | | AACACGTCAGTGGGCAGATGCTGTA |
| | | | ATTCTATTCATTATGCCTTACCATG |
| | | | TGCCTTACCATGTGGCAGATCCCAC |
| | | | GGCAGATCCCACAGGAGTTTGTCAA |
| | | | AGGAGTTGTGTCGAGCTCACAGCGT |
| | | | GCTCACAGCGTTTCTATCAACTTAC |
| | | | ACAACTTCATCTGTACTGCTTGAAT |
| | | | CCAGTCCCGGGCACTGAGTGTTGAA |
| | | | ATGATGTCTGAAGTTATTGCTGCAC |
| | | | ATTGCTGCACAATTACCCAAGATAT |
| 228554_at | PGR | −0.74820678 | CAGGGAATCTTTCTCATGACTCACG |
| | | | ATGACTCACGCCCTATTTAGTTATT |
| | | | ATTAATGCTACTACCCTATTTTGAG |
| | | | TAGGTCCCTAAGTACATTGTCCAGA |
| | | | TTTAGCCCCATATACTTCTTGAATC |
| | | | ATCTAAAGTCATACACCTTGCTCCT |
| | | | CCTTGCTCCTCATTTCTGAGTGGGA |
| | | | AATTGTTCTGAAGGTTTTTGCCAAG |
| | | | GTGATGGGGTGACAATGCAAAGCTG |
| | | | AGTGGGCACCTAATATCATCATCAT |
| | | | CAGTCTACTCAGCTTGACAAGTGTT |
| 200658_s_at | PHB | 0.758468503 | GCAGGGGATGGCCTGATCGAGCTGC |
| | | | CAGGGGATGGCCTGATCGAGCTGCG |
| | | | CAGCCCCGATGATTCTTAACACAGC |
| | | | GCAGGTGAGCGACGACCTTACAGAG |
| | | | TGAGCGACGACCTTACAGAGCGAGC |
| | | | TCCTGGATGACGTGTCCTTGACACA |
| | | | TGGATGACGTGTCCTTGACACATCT |
| | | | GACCTTCGGGAAGGAGTTCACAGAA |
| | | | TCGGGAAGGAGTTCACAGAAGCGGT |
| | | | GAGTTCACAGAAGCGGTGGAAGCCA |
| | | | GAGCAACAGAAAAAGGCGGCCATCA |
| 200659_s_at | PHB | 0.590980749 | GTCACTGATGGAAGGTTTGCGGATG |
| | | | GGATGAGGGCATGTGCGGCTGAACT |
| | | | CCAGCGGTTCCTGTGCAGATGCTGC |
| | | | GATGCTGCTGAAGAGAGGTGCCGGG |
| | | | GTCTGTCTGTTACCATAAGTCTGAT |
| | | | GAATCTGCCCCTGTTGAGGTGGGTG |
| | | | AGAGGAGGCCTGGACCGAGATGTGA |
| | | | CCCTCTCAGATACCCAGTGGAATTC |
| | | | TGAAGGATTGCATCCTGCTGGGGCT |
| | | | TGCTGGGGCTGAACATGCCTGCCAA |
| | | | GAACATGCCTGCCAAAGACGTGTCC |
| 202927_at | PIN1 | 0.598911611 | AGCCATTTGAAGACGCCTCGTTTGC |
| | | | ATTTGAAGACGCCTCGTTTGCGCTG |
| | | | TATTGTTCCCACAATGGCTGGGAGG |
| | | | CCGCCAGATTCTCCCTTAAGGAATT |
| | | | GATTCTCCCTTAAGGAATTGACTTC |
| | | | AAGGAATTGACTTCAGCAGGGGTGG |
| | | | GGTGCTGGAGGCAGACTCGAGGGCC |
| | | | GGAGGCAGACTCGAGGGCCGAATTG |
| | | | CAGACTCGAGGGCCGAATTGTTTCT |
| | | | TCAGTCGCAAAGGTGAACACTCATG |
| | | | AAAGGTGAACACTCATGCGGCAGCC |
| 206509_at | PIP | −0.87917581 | GGGGGCCAACAAAGCTCAGGACAAC |
| | | | GACATTCCCAAGTCAGTACGTCCAA |
| | | | AAAACTTACCTCATTAGCAGCATCC |
| | | | CAGCATCCCTCTACAAGGTGCATTT |
| | | | ATAAGTATACTGCCTGCCTATGTGA |
| | | | GACGACAATCCAAAAACCTTCTACT |
| | | | ATTGCAGCCGTCGTTGATGTTATTC |
| | | | ATTCGGGAATTAGGCATCTGCCCTG |
| | | | GCCCTGATGATGCTGCTGTAATCCC |
| | | | TAATGGAAGCCCTGTCTGTTTGCCA |
| | | | GTTTGCCACACCCAGGTGATTTCCT |
| 204458_at | PLA2G15 | 0.399043552 | GCCTTCTGGGAACCTATGGAGAAAG |
| | | | AGGGAATCCAAGGAAGCAGCCAAGG |
| | | | GGGTCTCACTAGTACCAAGTGGGTC |
| | | | GCACCCAGCTTAGTGCTGGGACTAG |
| | | | GGGACTAGCCCAGAAACTTGAATGG |
| | | | GGCAGTAGGCTCTAAGTGGGTGACT |
| | | | TGGGTGACTGGCCACAGGCCGAGAA |
| | | | GAAAAGGGTACAGCCTCTAGGTGGG |
| | | | CTGTTGCATACATGCCTGGCATCTG |
| | | | CCCACATGGGGCTCTGAGCAGGCTG |
| | | | GAGCAGGCTGTATCTGGATTCTGGC |
| 239392_s_at | POGK | −0.43817793 | TATGCTGAACATTTAGGGCCAGTAT |
| | | | GGGCCAGTATGTGTAACTGACATGC |
| | | | GGACAGTTGTACTCACTTTTGCTGG |
| | | | GTCTCAGTCCTGGAGCTATCTACAG |
| | | | GGAGCTATCTACAGTATGTTACCAG |
| | | | ATCTACAGTATGTTACCAGCGAGTA |
| | | | GAATAATAGCTTCTACTTGCTTTTC |
| | | | TACTTGCTTTTCCCTACAGAGTTCA |
| | | | GCTTTTCCCTACAGAGTTCAGGAGT |
| | | | TAAAACGTCATCTTAGTCTCATTAT |
| | | | TCATCTTAGTCTCATTATGACCTTC |
| 223260_s_at | POLK | −0.3539018 | GAAGAATGTTCTAGTCTCCCAAGCA |
| | | | TAGTCTCCCAAGCAAGTCTTTTAAT |
| | | | CAGAATTCTTCTTCTACTGTTTCAT |
| | | | ATTTAGACAAGAATACCGCCAGCCT |
| | | | ACCGCCAGCCTTACTTATGTGAAGT |
| | | | AACAGGCCAAGCTCTAGTTTGTCCT |
| | | | TAGTTTGTCCTGTTTGTAACGTAGA |
| | | | AAAGACTTCAGATCTAACCCTGTTC |
| | | | CTAACCCTGTTCAATGTGCATGTGG |
| | | | AAGCTCCAGAAGTACTGGTAGCTCA |
| | | | AAACAATCCCAAACATACCCTTGAT |
| 223261_at | POLK | −0.47165573 | GAATAAGCACTTGAATCAGTTTTTA |
| | | | GTCAATTATGTTGGTACTTTCCACA |
| | | | GAAGGATAAATTGTACCATCATTTT |
| | | | ATCATTTTATTATAATCCTCAAGAG |
| | | | GTATCTTAGTTACATTTCTATCAGT |
| | | | TACATTTCTATCAGTACTTTTATTA |
| | | | GTAGTTAGCTTAAGTAGTTTCTCCA |
| | | | GTAGTTTCTCCAAGTACTTTTGTGC |
| | | | TTCTCCAAGTACTTTTGTGCTATCA |
| | | | TTTGTGCTATCAATGAGTTCTTCTC |
| | | | AATAATTAGTTAGGCCAGGCACAAT |
| 202066_at | PPFIA1 | 0.411816725 | TAAAGAACGAACCTAGTGGGACATT |
| | | | GGGACATTTTTAGACTTTGATGCTC |
| | | | GATGCTCTAGCCATTTTGGATTGTG |
| | | | GGATTGTGTAAGTTGCAGATGTGGC |
| | | | TGCAGATGTGGCTTTTACTTTTTAA |
| | | | AAAGTGTGTCAGACCATGGCGTGGT |
| | | | ATGGCGTGGTATTTATTGTGCAGCA |
| | | | CAGAGGCAGCCTGTCTTTTCAGTTG |
| | | | TGTTTTTCTATTAATCTTTTGTCAA |
| | | | ATCTTTTGTCAACTTCCTGATTATG |
| | | | GTATGTACAGTCTACTTTTGAACTA |
| 210235_s_at | PPFIA1 | 0.350893924 | TCGAGTGATTCGCTGGATCCTGTCA |
| | | | GGATCCTGTCAATTGGCCTTAAAGA |
| | | | GAGCACTTCTGGCCTTAGATGAAAC |
| | | | GGCCTTAGATGAAACCTTCGACTTC |
| | | | GCACTGGCACTGCTGTTACAGATCC |
| | | | TTACAGATCCCGACGCAGAACACAC |
| | | | AGAACACACAGGCTCGTGCTGTCTT |
| | | | CAACCTTTTGGTCATGGGGACTGAT |
| | | | GCTTTAGGAGAGCACCTTCATGGAG |
| | | | AAAGGACATTCGTGGCTTAGCTGCT |
| | | | TCCCTGCAAACTTCCGGGTGACTTC |
| 210236_at | PPFIA1 | 0.48250638 | TGCAGATGGACGGTATGTGATGGGT |
| | | | TGATGGGTCACACTAACCTGTCACT |
| | | | GTCACACTAACCTGTCACTTGTTGG |
| | | | CTAACCTGTCACTTGTTGGGAGCAT |
| | | | TGTCACTTGTTGGGAGCATGAGCAG |
| | | | GCAGCTTTCTGTCTGGAACATTAAT |
| | | | AATAATGATCTAAAACGGCCTATTT |
| | | | AACGGCCTATTTAATATGTTACAAG |
| | | | TTTAATATGTTACAAGGCACTTGAG |
| | | | GGCACTTGAGTATGGTTGCATGTCC |
| | | | TGAGTATGGTTGCATGTCCAAATAT |
| 201957_at | PPP1R12B | −0.70564636 | GTTGTGCCTACCACTGGCTGGCACA |
| | | | ACTGGCTGGCACACCAGGGCAATGA |
| | | | GGGCAATGATTTCCCTGCAGAAGGA |
| | | | GAAAGAATGTTTCACCCTTGCATCC |
| | | | AGCTACAGCCTGTGCTCAGTTGAGT |
| | | | GTTCACACTCAGACTTTGGCTTTAT |
| | | | AAGAACCACCCTGAGGTTTCCATGC |
| | | | ATGCCTCTCCCATTTTAGTGGTAGC |
| | | | GGTAGCATTTTGTGTCTTTACTCCA |
| | | | TAGTTCCACCAAGGTTCACACACCA |
| | | | TTTGAGTGGCCTTTCAACCCTAAGA |
| 208680_at | PRDX1 | 0.644273963 | TTCTCACTTCTGTCATCTAGCATGG |
| | | | GGGACCCATGAACATTCCTTTGGTA |
| | | | TTTGGTATCAGACCCGAAGCGCACC |
| | | | GAAGCGCACCATTGCTCAGGATTAT |
| | | | GAAGGCATCTCGTTCAGGGGCCTTT |
| | | | AAGGGTATTCTTCGGCAGATCACTG |
| | | | GTTGCCGCTCTGTGGATGAGACTTT |
| | | | CTTTGAGACTAGTTCAGGCCTTCCA |
| | | | AGGCCTTCCAGTTCACTGACAAACA |
| | | | GTGAGCGCTGGGCTGTTTTAGTGCC |
| | | | TTTAGTGCCAGGCTGCGGTGGGCAG |
| 218302_at | PSENEN | 0.429531662 | TGCATCTGTTACTTAGGGTCAAGGC |
| | | | TAGGGTCAAGGCTTGGGTCTTGCCC |
| | | | CCCCAGCGCAGCTATGAACCTGGAG |
| | | | GAACCTGGAGCGAGTGTCCAATGAG |
| | | | AACCTGTGCCGGAAGTACTACCTGG |
| | | | CCTTTTCTCTGGTTGGTCAACATCT |
| | | | TTGGTCAACATCTTCTGGTTCTTCC |
| | | | CAGCCTACACAGAACAGAGCCAAAT |
| | | | ATCAAAGGCTATGTCTGGCGCTCAG |
| | | | TCTGGGTGATAGTGCTCACCTCCTG |
| | | | GCCGGAGGAAGTGAGCTCTCCTGGG |
| 203447_at | PSMD5 | −0.40381229 | GATTGCTGAGGGTTTTGCTTTGGAT |
| | | | TGCTTTGGATTTTTCATACCTATAA |
| | | | GTTCTTCTCTCTAAACAGCAAAGCC |
| | | | AGCAAAGCCAAAGCACTCTGCACAC |
| | | | GAGCATATTTCTTTTAGGCCGTGGT |
| | | | GTGAAGTTGATAAACCACCCCTGCT |
| | | | TCTAGTCCCCAGATTGATCATCTCC |
| | | | GGCAACGTGACTCTGTTTTTTGTGT |
| | | | TGTGTGTGTTTCCATGCTGACTAGT |
| | | | GACTAGTCCCCTACTGTTAATATCA |
| | | | TTAGGCTATAACCAGGTCTTTCCTG |
| 206687_s_at | PTPN6 | 0.515021453 | GGGCCTGGACTGTGACATTGACATC |
| | | | GACGGAGGCGCAGTACAAGTTCATC |
| | | | CCATCGCCCAGTTCATTGAAACCAC |
| | | | GCAGTCGCAGAAGGGCCAGGAGTCG |
| | | | GCCAGGAGTCGGAGTACGGGAACAT |
| | | | CCTATCCCCCAGCCATGAAGAATGC |
| | | | GAAGCAGCGGTCAGCAGACAAGGAG |
| | | | GAGGAAGTGAGCGGTGCTGTCCTCA |
| | | | ACCCTGTGGAAGCATTTCGCGATGG |
| | | | TTCGCGATGGACAGACTCACAACCT |
| | | | CACAACCTGAACCTAGGAGTGCCCC |
| 201482_at | QSOX1 | −0.59145376 | TGGAATGGAACTCCTCACTAGCTGC |
| | | | CTGCTCCCTTCCGGACAATGAAGAA |
| | | | CTCCTGGGTGGGGTTTGGCTTCAGG |
| | | | TGGTCTCCCAGGTGAGGCAAGCCAT |
| | | | TAGGGTGAGTGGCTTGCTTGGTGGG |
| | | | GTGGGACCTGACGAGTTGGTGGCAT |
| | | | GGGAAGGATGTGGGTCTCTAGTGCC |
| | | | CTTGCCCTGGCTTAGCTGCAGGAGA |
| | | | GAGAAGATGGCTGCTTTCACTTCCC |
| | | | TTTGGTCTCCAAGATGAATGCTCAT |
| | | | GGAGGGTGCCAGGTAGAAGCTAGGG |
| 219681_s_at | RAB11F1P1 | 0.430010968 | CAGGCTAATAGCGTGGTTGGGGGTG |
| | | | TGTCCTTGTTACATTGAGGTTAAGA |
| | | | GTGCAATCTCTTTCCAGGATTTCGT |
| | | | GGATTTCGTTTGCTGTGGCATTGGT |
| | | | GGCATTGGTTATATCAGAGCACTTT |
| | | | GCTTTTAATTATCTACAGCTATTTT |
| | | | TTCTCTCCTACAGTACTGGGACCAC |
| | | | CTGGGACCACTGTAAACTTCTCAGA |
| | | | AAACTTCTCAGATGACTTGTATTTT |
| | | | TTGTTGTTACTCACTTAAGACTGGA |
| | | | TTTTTTCCCTGGCTATGATAGAATC |
| 225177_at | RAB11F1P1 | 0.575553639 | GAAGGAGTAAGTCTGCCCTTTGCCA |
| | | | TGTGGACCCCGATTGGTGAGGGCTC |
| | | | GTGAGGGCTCTGCATATGCCTGTAT |
| | | | GTGTGTGCACATGCCGGTATGAAGA |
| | | | CAGGCATGTGCTTCTCAGTTTTGCT |
| | | | GTCCATGATGCTCAGCCACATACTG |
| | | | AATGTTAAATGACGCACCATCCTCC |
| | | | GAACTACTAATTATCTCTCAAGGCT |
| | | | GTATCCACCAAACTTAACTCCGTAT |
| | | | TAACTCCGTATCTCCATATGGTGTC |
| | | | ACTGAAGGATCGCCCAACGTTTTTG |
| 231830_x_at | RAB11F1P1 | 0.356254051 | TACAGTTCTCCAGGTGTGGAATGAT |
| | | | GTCAATACGATTGCTTGGCCTTTTC |
| | | | CAGCAACACTCCTTGTAAGGGGCAG |
| | | | TAAGGGGCAGAGACAGGGTCCACCA |
| | | | TCCACCAACTCCCCAAGATGAAGAA |
| | | | AGATGAAGAAGCCCCTTCAGGCCAG |
| | | | TCAGGCCAGTCGTGGTGGCTCATGC |
| | | | CAGCACTTTGCAAGGCCGAGGAGGG |
| | | | GGAGGCTGCAGCGAGCCAAGATCGT |
| | | | AGGAGACCATAGGATTTGGACCCCA |
| | | | GACCCCAAAGGGATGTGAACTGATC |
| 202252_at | RAB13 | −0.61976806 | GAGAGATGCCTCAGGCTTCAGACCT |
| | | | CTTCAGACCTTACCTGGGTTTTCAG |
| | | | AGGGTCCTGCAAAAGGCTAGCTCGG |
| | | | GCTAGCTCGGCACTACACTAGGGAA |
| | | | ACTAGGGAATTTGCTCCTGTTCTGT |
| | | | TCACTTGTCATGGTCTTTCTTGGTA |
| | | | GGTATTAAAGGCCACCATTTGCACA |
| | | | CAGGAAACGGCAACAAGCCTCCCAG |
| | | | GCCTCCCAGTACTGACCTGAAAACT |
| | | | GAAGAACACCAACAAGTGCTCCCTG |
| | | | CACCCCGGAAGCTGAACCTGAGGGA |
| 243777_at | RAB7L1 | 0.650862748 | AAGGAGCTGACTGGGATTCAGTCAC |
| | | | TGACTTGGAGCCGCTCGGGGGAAGT |
| | | | GACTTGGAGCCGCTCGGGGGAAGTC |
| | | | TTTCTCGGCAGTCAGGCCAGGAGGG |
| | | | CTTCCTCACAATTTGGTTTGTGCTG |
| | | | GTTTGTGCTGCAAGGGGAGGGTCCC |
| | | | GTGCTGCAAGGGGAGGGTCCCCATC |
| | | | GCAAGGGGAGGGTCCCCATCATCTG |
| | | | CAAGGGGAGGGTCCCCATCATCTGG |
| | | | GCCCCAGTGGTGTAAGGAGCTGACT |
| | | | GGTGTAAGGAGCTGACTGGGATTCA |
| 220338_at | RALGPS2 | −0.49372178 | GAGAGCTAACGTTTGATAGTTCTAA |
| | | | GAATCCTTATAGAATTTGTCTTTTA |
| | | | AAATTACTCTTCTTTAATGCTAAGT |
| | | | AATGCTAAGTATTGACACATCGTTG |
| | | | TTGACACATCGTTGTTTGTTTTTCA |
| | | | TTTCATTGTTTTTGCGGATTGAGAG |
| | | | GCGGATTGAGAGACTTGGTCCATCT |
| | | | ACTTGGTCCATCTTGTCTCAGGAGA |
| | | | GAAACCTTTCTCCAATGTAGCAGAA |
| | | | TATCCTCTTCCCTGTATTATAGCAA |
| | | | TTAAAGATTTTTGAGGCCGGGCACA |
| 227224_at | RALGPS2 | −0.57369561 | TTACAGACTCTAGCTTTCCTTATTA |
| | | | TATTAGCTTAAACTGGGGCCCTCAA |
| | | | CCCTCAAAGAGCAGCCTGTTGATCT |
| | | | TAAACTGTATACCTTTACTACTGAA |
| | | | TGGGTTCCATCCATTAGCTTTTTAA |
| | | | GATCTGGTATTGATTTCCTTCCTGT |
| | | | GGCACATTCCTTTACAACCAGTGTT |
| | | | TAAACCACCACGTAATCATCTTCTG |
| | | | AACAAGGGGTGCCAGTGTTGCCTAA |
| | | | GAGTTTAACTGTGTCCAGGTGGAGT |
| | | | GTATGACTTCTTTAGTGACCTTTTA |
| 227533_at | RALGPS2 | −0.73589294 | GCTGTGCTTTAGATACCAGATAACA |
| | | | GTTTCCCCTGAAGATATGACCTACT |
| | | | ATGACCTACTAGAACTACTCACATA |
| | | | GAGTTTCTGTACCTTGATTATTGAC |
| | | | GGGGTGGGGAACTGGTTCACAACAT |
| | | | GTAAGGACAGGTACCCAGTGATGAT |
| | | | TTTATTCTTTATCCCAATTAACTTG |
| | | | AGCACTCGATTGCACTATGACCTCC |
| | | | ATGACCTCCTTGAGTGATGTGCAGC |
| | | | GTGAGTGTGCGATCTTCAGTGTGTC |
| | | | CAGTGTGTCTGCATAAGCTAACTTA |
| 232112_at | RALGPS2 | −0.62900747 | TCTGGCGGTGCTGTGCTTGGAATAG |
| | | | AGATCGTAGCTAATTTGCATTTCTT |
| | | | AAAACATACTCTTGTGGATTCCATC |
| | | | GTGGATTCCATCAGGAGCTGGTTTT |
| | | | GGAGCTGGTTTTGAACCGAGGTGAA |
| | | | AATGTTAGTCATGTGAGTTCTTGGG |
| | | | ACATTATTTCCTGCAGGAGGTACAA |
| | | | AGGAGGTACAAAGGCTGTGTGTTCA |
| | | | GGCTGTGTGTTCATTTGCCAGACGC |
| | | | TGTGTTCATTTGCCAGACGCTTTTT |
| | | | TTCATTTGCCAGACGCTTTTTTTTT |
| 242458_at | RALGPS2 | −0.63334516 | ACAATAATTAGATCTTTTTCCAAGT |
| | | | CCCTTCTCCCAGTCATAGGTGGTTT |
| | | | GGTGGTTTTTATCATCAAGACAGAC |
| | | | CAGTGTTTGATGTGCATAATGCCAG |
| | | | TTCTCTCTTTTTGTTCAATATGAGA |
| | | | GATTCAGGATCATATTTGTTTAAAA |
| | | | CTGAAAATTTACTGTCGGTCTCTGA |
| | | | GTCGGTCTCTGACATGAAACCGTAT |
| | | | GAAACCGTATTTTGTCAGTAGTTGA |
| | | | GTAGTTGACCAAGCAGTTTTATGAG |
| | | | GAGAACTCTTCTATGCAATGATGCA |
| 203750_s_at | RARA | 0.417245729 | GCCTGACCACTGGGTGTGGACGGTG |
| | | | ACCACTGGGTGTGGACGGTGTGGGG |
| | | | GGGCAGCCCTGAAAGGACAGGCTCC |
| | | | GCAGCCCTGAAAGGACAGGCTCCTG |
| | | | TGCACCCACCATGAGGCATGGAGCA |
| | | | CCATGAGGCATGGAGCAGGGCAGAG |
| | | | GGAGCAGGGCAGAGCAAGGGCCCCG |
| | | | CCCCCACTGTGAAGGGGCTGGCCAG |
| | | | CACACACACACTGGACAGTAGATGG |
| | | | GGACAGTAGATGGGCCGACACACAC |
| | | | AGATGGGCCGACACACACTTGGCCC |
| 206499_s_at | RCC1 | 0.693335069 | TGTCCCTAACAGTCCACAGGCAAAC |
| | | | TCATAAGAGCCATCTGTCACGGACC |
| | | | ACCCACGCCCAGAGGAACGTGCAGA |
| | | | AAGTGATTCTCCCAGAAGCACAAAG |
| | | | AAGCACAAAGCATACTCTTGCCCCT |
| | | | CCCTCAGGTGTTGCTTGTGTACATC |
| | | | TGCTTGTGTACATCGTACCCATCCA |
| | | | AGCCAACGGCCTGGAATCGCAAAGA |
| | | | AAAGAGACACCACTCTGGGCAGAGC |
| | | | GGAGGGACAGAGTGTTGGAGGGCCA |
| | | | GGAGGGCCAGAGACTAGTCCTGAGA |
| 215747_s_at | RCC1 | 0.561781335 | CCCAGAACCTAACATCCTTCAAGAA |
| | | | AGGAAAAGCATACAGCCTGGGCCGG |
| | | | CCTGGGCCGGGCTGAGTATGGGCGG |
| | | | CCTCTGTGGGGTATGCTGTGACCAA |
| | | | CCAAGGATGGTCGTGTTTTCGCCTG |
| | | | CAACTACCAGCTGGGCACAGGGCAG |
| | | | CGCCTGGAGCCCTGTGGAGATGATG |
| | | | GAACCGTGTGGTCTTATCTGTGTCC |
| | | | GGGGCCAGCATACAGTCTTATTAGT |
| | | | AGAGCTGATGAAGCCTCTGAGGGCC |
| | | | CAGCTGCAGATGGCAGCGGGCCTCT |
| 204336_s_at | RGS19 | 0.391879986 | CAGTGGGGAGTGCTGTGTCTCCTGG |
| | | | GCCAAGCAGGAACTCCAGGTGCAGG |
| | | | TGGGGGCTCTTGCGTGGTGAGAGTA |
| | | | TGCGTGGTGAGAGTAGGGGTCCCCC |
| | | | TTGGTGGGGAACAGAACCTCCGCAT |
| | | | ACCTCCGCATCGTGTAGTTTTGTGA |
| | | | TACTTGAGCTGTCTGTACCCCAGAA |
| | | | TGTACCCCAGAATCAAACACAGAAC |
| | | | CTCAGAATCCTGCACTCAAGGTGGC |
| | | | TAAACCTGGAAACATGTCCTTACTA |
| | | | ACATGTCCTTACTAGGTGTTTTATC |
| 227543_at | RNASEH2C | 0.501348241 | TTCCTCACCCTCATAATGGACCTTA |
| | | | GACTGAGTTTCTTCAAGCATCCACT |
| | | | TCCACTTGTGCTACCAGGCTGAGAA |
| | | | GACCCCATCTGGGCATCATTTAACC |
| | | | AGATTCCTGTCTCTAATCCAGACCT |
| | | | TAGCTGGGACCTTGGGAGTGTCACC |
| | | | AAGACTTGAGTGGCCTGACTGGGTG |
| | | | GGTGCTTCCTAAGTCGGGGAGACCA |
| | | | TCCAACTCGTGCTGATAGCTGGCCG |
| | | | TGCACAGCCCTGAGTGGCTTCACAT |
| | | | TTCACATCTCTTGGTCAGTGTCTTC |
| 200088_x_at | RPL12 | −0.50184421 | GAAGTTCGACCCCAACGAGATCAAA |
| | | | AGTCGTATACCTGAGGTGCACCGGA |
| | | | GCAACGGGTGACTGGAAGGGCCTGA |
| | | | GACCATTCAGAACAGACAGGCCCAG |
| | | | GGCCCAGATTGAGGTGGTGCCTTCT |
| | | | TCGACAGATGCGGCACCGATCCTTA |
| | | | ACCGATCCTTAGCCAGAGAACTCTC |
| | | | AGATCCTGGGGACTGCCCAGTCAGT |
| | | | GGCTGTAATGTTGATGGCCGCCATC |
| | | | CGCCATCCTCATGACATCATCGATG |
| | | | GTGGTGCTGTGGAATGCCCAGCCAG |
| | | | GAAGTTCGACCCCAACGAGATCAAA |
| | | | AGTCGTATACCTGAGGTGCACCGGA |
| | | | GCAACGGGTGACTGGAAGGGCCTGA |
| | | | GACCATTCAGAACAGACAGGCCCAG |
| | | | GGCCCAGATTGAGGTGGTGCCTTCT |
| | | | TCGACAGATGCGGCACCGATCCTTA |
| | | | ACCGATCCTTAGCCAGAGAACTCTC |
| | | | AGATCCTGGGGACTGCCCAGTCAGT |
| | | | GGCTGTAATGTTGATGGCCGCCATC |
| | | | CGCCATCCTCATGACATCATCGATG |
| | | | GTGGTGCTGTGGAATGCCCAGCCAG |
| 200809_x_at | RPL12 | −0.4817517 | GAGGTGAAGTCGGTGCCACTTCTGC |
| | | | GCAACGGGTGACTGGAAGGGCCTGA |
| | | | GGCCCAGATTGAGGTGGTGCCTTCT |
| | | | CCCTGATCATCAAAGCCCTCAAGGA |
| | | | TCGTCCCGAATCCGGGTTCATCCGA |
| | | | TCGACAGATGCGGCACCGATCCTTA |
| | | | ACCGATCCTTAGCCAGAGAACTCTC |
| | | | AGATCCTGGGGACTGCCCAGTCAGT |
| | | | TGTTGATGGCCGCCATCCTCATGAC |
| | | | GTGGTGCTGTGGAATGCCCAGCCAG |
| | | | GAAGTTCGACCCCAACGAGATCAAA |
| 214271_x_at | RPL12 | −0.38430476 | GCAACGGGTGACTGGAAGGGCCTGA |
| | | | GACCATTCAGAACAGACAGGCCCAG |
| | | | GGCCCAGATTGAGGTGGTGCCTTCT |
| | | | CCCTGATCATCAAAGCCCTCAAGGA |
| | | | AACATTGCTCGACAGATGCGGCACC |
| | | | AGATCCTGGGGACTGCCCAGTCAGT |
| | | | TGTTGATGGCCGCCATCCTCATGAC |
| | | | AGTGGTGCTGTGGAATGCCCAGCCG |
| | | | TGCCCAGCCGTAAGTGACATTTTCA |
| | | | GTTACTGGTGGGGTGGGATAATCCT |
| | | | TTTTCTTTCCCACAGAGTTAAGCAC |
| 200074_s_at | RPL14 | −0.39457538 | TCAGAACAGGGCTTTGGTCGATGGA |
| | | | GGCTTTGGTCGATGGACCTTGCACT |
| | | | TGCCTTTCAAGTGCATGCAGCTCAC |
| | | | ATGCAGCTCACTGATTTCATCCTCA |
| | | | AAATGGGCAGCCACACGATGGGCCA |
| | | | GGCAGCCACACGATGGGCCAAGAAG |
| | | | AAGATGACAGATTTTGATCGTTTTA |
| | | | GAAGCTTCAAAAGGCAGCTCTCCTG |
| | | | TCCCAAAAAAGCACCTGGTACTAAG |
| | | | GCACCTGGTACTAAGGGTACTGCTG |
| | | | TGCTGCTGCTAAAGTTCCAGCAAAA |
| | | | TCAGAACAGGGCTTTGGTCGATGGA |
| | | | GGCTTTGGTCGATGGACCTTGCACT |
| | | | TGCCTTTCAAGTGCATGCAGCTCAC |
| | | | ATGCAGCTCACTGATTTCATCCTCA |
| | | | AAATGGGCAGCCACACGATGGGCCA |
| | | | GGCAGCCACACGATGGGCCAAGAAG |
| | | | AAGATGACAGATTTTGATCGTTTTA |
| | | | GAAGCTTCAAAAGGCAGCTCTCCTG |
| | | | TCCCAAAAAAGCACCTGGTACTAAG |
| | | | GCACCTGGTACTAAGGGTACTGCTG |
| | | | TGCTGCTGCTAAAGTTCCAGCAAAA |
| 213588_x_at | RPL14 | −0.42386316 | GGCAGACATCAATACAAAATGGGCA |
| | | | AGCAAAAAAGATCACCGCCGCGAGT |
| | | | GCCGCGAGTAAAAAGGCTCCAGCCC |
| | | | TAAAAAGGCTCCAGCCCAGAAGGTT |
| | | | CAGGCCAGAAAGCAGCGCCTGCTCC |
| | | | CGCCTGCTCCAAAAGCTCAGAAGGG |
| | | | GAAGGGTCAAAAAGCTCCAGCCCAG |
| | | | AAAAAGCTCCAGCCCAGAAAGCACC |
| | | | AGAAAGCACCTGCTCCAAAGGCATC |
| | | | ACCTGCTCCAAAGGCATCTGGCAAG |
| | | | CATCTGGCAAGAAAGCATAAGTGGC |
| 211073_x_at | RPL3 | −0.49096872 | GGAACCAAGAAGCGGGTGCTCACCC |
| | | | AAGTCCTTGCTGGTGCAGACGAAGC |
| | | | TTAAGTTCATTGACACCACCTCCAA |
| | | | GCCTGCGCAAGGTGGCCTGTATTGG |
| | | | TGTATTGGGGCATGGCATCCTGCTC |
| | | | GCACGCGCTGGGCAGAAAGGCTACC |
| | | | TACCATCACCGCACTGAGATCAACA |
| | | | GATTGGCCAGGGCTACCTTATCAAG |
| | | | GATCAAGAACAATGCCTCCACTGAC |
| | | | CTCCACTGACTATGACCTATCTGAC |
| | | | TCAACCCTCTGGGTGGCTTTGTCCA |
| 211666_x_at | RPL3 | −0.37973203 | TGTGGGCATTGTGGGCTACGTGGAA |
| | | | CTCCGGACCTTCAAGACTGTCTTTG |
| | | | GAAGGCCTTTACCAAGTACTGCAAG |
| | | | AGAAGTACTGCCAAGTCATCCGTGT |
| | | | GCTTCCTCTGCGCCAGAAGAAGGCC |
| | | | AGAAGGCCCACCTGATGGAGATCCA |
| | | | GCACTGTGGCCGAGAAGCTGGACTG |
| | | | GAGGCTTGAGCAGCAGGTACCTGTG |
| | | | CAAAGGGGTCACCAGTCGTTGGCAC |
| | | | GCCTGCGCAAGGTGGCCTGTATTGG |
| | | | CCTGTATTGGGGCATGGCATCCTGT |
| 212039_x_at | RPL3 | −0.43456801 | GCACGCGCTGGGCAGAAAGGCTACC |
| | | | TACCATCACCGCACTGAGATCAACA |
| | | | GATTGGCCAGGGCTACCTTATCAAG |
| | | | GATCAAGAACAATGCCTCCACTGAC |
| | | | CTCCACTGACTATGACCTATCTGAC |
| | | | CCTCTGGGTGGCTTTGTCCACTATG |
| | | | GGAACCAAGAAGCGGGTGCTCACCC |
| | | | AAGTCCTTGCTGGTGCAGACGAAGC |
| | | | GAAGCGGCGGGCTCTGGAGAAGATT |
| | | | TTAAGTTCATTGACACCACCTCCAA |
| | | | CTCCAAGTTTGGCCATGGCCGCTTC |
| 215963_x_at | RPL3 | −0.3611629 | GGAACCAAGAAGCGGGTGCTCACCC |
| | | | TGGTGCAGATGAAACGGCAGGCTCT |
| | | | TTAAGTTCATTGACACCACCTCCAA |
| | | | ACCACCTCCAAGTTTGGCCATGGCT |
| | | | CAAAGGGGTCACCAGTCGTTGGCAC |
| | | | TTGGCACACCAAGAAGCTGCCCTGC |
| | | | TGTATTGGGGCATGGCATCCTGCTC |
| | | | CTGGGGAGAAAGGCTACCGTCACCG |
| | | | GATTGGCCAGGGCTACCTTATCAAG |
| | | | GATCAAGAACAATGCCTCCACTGAC |
| | | | AGAGCACCAATCCTCTGGGTGGCTT |
| 211720_x_at | RPLP0P6 | 0.389281786 | ACGCTGCTGAACATGCTCAACATCT |
| | | | CTGGTCATCCAGCAGGTGTTCGACA |
| | | | GGCAGCATCTACAACCCTGAAGTGC |
| | | | CAGAGGAAACTCTGCATTCTCGCTT |
| | | | CTTCCTGGAGGGTGTCCGCAATGTT |
| | | | ATGTTGCCAGTGTCTGTCTGCAGAT |
| | | | GATTGGCTACCCAACTGTTGCATCA |
| | | | AGTACCCCATTCTATCATCAACGGG |
| | | | TGTGGAGACGGATTACACCTTCCCA |
| | | | AAGGTCAAGGCCTTCTTGGCTGATC |
| | | | GCAGCCCCAGCTAAGGTTGAAGCCA |
| 203777_s_at | RPS6KB2 | 0.687015289 | GCTTCACACGGCAGACGCCGGTGGA |
| | | | AGACGCCGGTGGACAGTCCTGATGA |
| | | | TCAGCGAGAGTGCCAACCAGGCCTT |
| | | | ATCAAGGAGGGCTTCTCCTTCCAGC |
| | | | TCCAGGGCGCTAGGAAGCCGGGTGG |
| | | | TGGGGGTGAGGGTAGCCCTTGAGCC |
| | | | TGTCCCTGCGGCTGTGAGAGCAGCA |
| | | | GTTCCAGAGACCTGGGGGTGTGTCT |
| | | | GGTGGGGTGTGAGTGCGTATGAAAG |
| | | | TGCGTATGAAAGTGTGTGTCTGCTG |
| | | | CTGAATCATGGGCACGGAGGGCCGC |
| 218914_at | RRNAD1 | −0.60664512 | CACTGGAGACAGTCATCCGACGGGC |
| | | | CAGGGTCCACGAGCTCAAGATTGAA |
| | | | ATATGTGCAGCGGGGGCTACAGCGA |
| | | | GGCTACAGCGAGTGGGGCTAGATCC |
| | | | TGGCCCAGGAGAACCGTGTGGTGGC |
| | | | TGGAGACGCTTATTCTACTGGACCG |
| | | | GAACTCTCTCCCAGAAACCTGGTTC |
| | | | GAGACTGAAGACAGCTGATGCAGCC |
| | | | CATCTCAGACCCCATCATCTGAAAG |
| | | | CAGTGGCAGAGTACATCTCATCCAG |
| | | | TCTCATCCAGAGAAACAGCATCCTG |
| 228923_at | S100A6 | 0.344698431 | CTCTCCAAATGAGGACCAGTAACTG |
| | | | GTAACTGAGAAGTAGCTGAGGAGAA |
| | | | GCAATGCCAAAGTGACATGGGTCCT |
| | | | AAAGTGACATGGGTCCTTGGTGATG |
| | | | GGGTCCTTGGTGATGAGGGAGCACA |
| | | | GGGGAAGAATCCAGGGTTGTCATCA |
| | | | AAGAATCCAGGGTTGTCATCACCAC |
| | | | GTCATCACCACTGAGTATGGATTTC |
| | | | CACTGAGTATGGATTTCACATTCTA |
| | | | CCCTGGTCCACATGTAGACCCTGAG |
| | | | ACATGTAGACCCTGAGCTGTAGACC |
| 206378_at | SCGB2A2 | −0.69528746 | CTGGCTGCCCCTTATTGGAGAATGT |
| | | | ATTTCCAAGACAATCAATCCACAAG |
| | | | GTTCATAGACGACAATGCCACTACA |
| | | | ACCAAACGGATGAAACTCTGAGCAA |
| | | | ATGACAGCAGTCTTTGTGATTTATT |
| | | | TAACTTTCTGCAAGACCTTTGGCTC |
| | | | AGACCTTTGGCTCACAGAACTGCAG |
| | | | GAGAAACCAACTACGGATTGCTGCA |
| | | | TACGGATTGCTGCAAACCACACCTT |
| | | | CTTCTCTTTCTTATGTCTTTTTACT |
| | | | GCAGCAGCCTCACCATGAAGTTGCT |
| 203453_at | SCNN1A | −0.5731827 | GACTCCCGAGGGCTAGGGCTAGAGC |
| | | | TTCATACCTCTACATGTCTGCTTGA |
| | | | CTGCCAGAGAACTCCTATGCATCCC |
| | | | TTACTTTTGTGAACGCTTCTGCCAC |
| | | | GTCTTCCCCAAAATTGATCACTCCG |
| | | | CTCCCGTAGCACACTATAACATCTG |
| | | | GCTGGAGTGTTGCTGTTGCACCATA |
| | | | GTTGCACCATACTTTCTTGTACATT |
| | | | TAAGTGCCTTGCGGTCAGGGACTGA |
| | | | GAATCTTGCCCGTTTATGTATGCTC |
| | | | TATGTATGCTCCATGTCTAGCCCAT |
| 202675_at | SDHB | 0.607788535 | ACCCTCTTCCACACATGTATGTGAT |
| | | | AAAGGATCTTGTTCCCGATTTGAGC |
| | | | GTTCCCGATTTGAGCAACTTCTATG |
| | | | TTTGAGCAACTTCTATGCACAGTAC |
| | | | AGGATGAATCTCAGGAAGGCAAGCA |
| | | | GCAGTCCATAGAAGAGCGTGAGAAA |
| | | | AAGAGCGTGAGAAACTGGACGGGCT |
| | | | GGAACGGAGACAAATATCTGGGGCC |
| | | | ATATCTGGGGCCTGCAGTTCTTATG |
| | | | CTGCAGTTCTTATGCAGGCCTATCG |
| | | | GATGACTTCACAGAGGAGCGCCTGG |
| 223299_at | SEC11C | 0.520144155 | TGGAAAGGCTTGATCGTGCTCACAG |
| | | | CACAGGCAGTGAGAGCCCCATCGTG |
| | | | CCCCATCGTGGTGGTGCTGAGTGGC |
| | | | TGAGTGGCAGTATGGAGCCGGCCTT |
| | | | TCACAGAGGAGACCTCCTGTTCCTC |
| | | | TCCTGTTCCTCACAAATTTCCGGGA |
| | | | GGGAAGACCCAATCAGAGCTGGTGA |
| | | | GACGAGACATTCCAATAGTTCACAG |
| | | | GGAAGAGCAAGAGGGTTTTTACCAT |
| | | | TATGCTCTTTTGGCTGTAATGGGTG |
| | | | ATTTGAGATGTTCCATTTTCTGTAT |
| 204563_at | SELL | 0.470833687 | CCTCGCCGTCTGTGAATTGGACCAT |
| | | | GGACCATCCTATTTAACTGGCTTCA |
| | | | TTTTCAGTTGGCTGACTTCCACACC |
| | | | CCACACCTAGCATCTCATGAGTGCC |
| | | | TAGCCTGCGCTGTTTTTTAGTTTGG |
| | | | TTTATGAGACCCATTCCTATTTCTT |
| | | | GTCAATGTTTCTTTTATCACGATAT |
| | | | GACCTTTTATCCACTTACCTAGATT |
| | | | CACCACTTCTTTTATAACTAGTCCT |
| | | | TAGTCCTTTACTAATCCAACCCATG |
| | | | CTCTTCCTGGCTTCTTACTGAAAGG |
| 208999_at | SEPT8 | −0.41582035 | AGTTAGCCCCCATAGAATGTGACCC |
| | | | GAATGTGACCCTGTCTGCAGAGTCT |
| | | | TGTCTGCAGAGTCTCATTTACCCCT |
| | | | GTTGGCTTTATTAGGGCTGTCTTAC |
| | | | GTTGGCATTTACTATCATGTCTTTA |
| | | | ATCACCATATAATTCGTTGCCCAAA |
| | | | AAAGGCATAAACCAGACCTGTCCCA |
| | | | GGGGCTCATGGATACGAGGCCTGAG |
| | | | GAAGTGTGGCTTGCTAGTCTGTTAC |
| | | | GCTTTTCTAAAATTGCTTCACGTGT |
| | | | CTTTTCCATTCACTTTGTACTTATT |
| 209000_s_at | SEPT8 | −0.41229454 | GTGAGGACGGACTGGGAGCCGGTAC |
| | | | GGAGCCGGTACAGACTCCAGTGTTT |
| | | | CCCCTCTCTATGCAAACACGTAAAA |
| | | | TCAGAGCCAGTGGCTGGTCTTCCAT |
| | | | TACAGTGTCACTATTCCCTGACGGA |
| | | | TTCCCTGACGGAGCTGTTATGTGCC |
| | | | TTATGTGCCGCTCTAGCGAAGGCCC |
| | | | CTAGGCCTAATTGTTCAGCGTGGAG |
| | | | AGATGGCAACTCACGTGGTGCCCTA |
| | | | GCGTGGTCTGGTATACATGCTGCAA |
| | | | TATCCTCTCCCATTATTTTCATAAG |
| 226627_at | SEPT8 | −0.47811452 | GAAACTCACCATAATAGTGCCGTCT |
| | | | GGGAGTCTGGTGGAACTGTGTTGGA |
| | | | TTAAGATACCTTTTCACTCTTCCGT |
| | | | TCCGTATGTCATGAGCCTTGTGCGT |
| | | | GGGTAGACTCTGTAAACACCTCCTT |
| | | | CACCTCCTTACTCACTATAGTCAAG |
| | | | ATAGTCAAGAAGTCCAGCGGCGTCC |
| | | | AGCGGCGTCCCAATATAGAGGTCCC |
| | | | GCAGTCTGTCCAGAATAGCCAGCTC |
| | | | ATCCTCAGCAGCTCATTCGGGGAAT |
| | | | GGGGAATAGTCAGAGCCATAGTGCT |
| 40149_at | SH2B1 | −0.40484824 | GCTGCAGCAGTCACCACTAGGGGGT |
| | | | CCCAGGGCCATTAACAACCAGTACT |
| | | | AGTACTCCTTCGTGTGAGCCAACCC |
| | | | GCTTCCTGACCCTTGTTGGCCAAGG |
| | | | CTTCCTGACCCTTGTTGGCCAAGGG |
| | | | TCCTGACCCTTGTTGGCCAAGGGCA |
| | | | CCCTTGTTGGCCAAGGGCATCTTTG |
| | | | TTGGCCAAGGGCATCTTTGATGGTA |
| | | | GCCAAGGGCATCTTTGATGGTACAA |
| | | | ATCTTTGATGGTACAAGCAGAGGCT |
| | | | TCTTTGATGGTACAAGCAGAGGCTC |
| | | | TTTGATGGTACAAGCAGAGGCTCGG |
| | | | GAGAGGCTCCCGTCACACACTACAG |
| | | | GGGGATTTGGGCTCCATGAGCTCCT |
| | | | CTTGAGGGGCTCTTCTGGTCAGCCC |
| | | | GAGGGGCTCTTCTGGTCAGCCCCAC |
| 218797_s_at | SIRT7 | 0.50897414 | CCCATCCTAGGGGGCTGGTTTGGCA |
| | | | GGCAGGGGCTGCACAAAACGCACAA |
| | | | GACGTAATCACGTGCTCGATGAAGA |
| | | | GCAGATGGCCAGTGTCACGGTGAAG |
| | | | TTTTCACCGTGACATTTTTAGCCAT |
| | | | GCCATTTGTCCTTGAGGAAGCCCCT |
| | | | GATACGGCCTGGCCATCGAGGACAC |
| | | | CCATCCGGCCTCTGTGTCAAGAGGT |
| | | | CCTCACCGTATTTCTACTACTACTT |
| | | | GAACTTTATAGAATCCTCTCTGTAC |
| | | | TGGATGTGCGGCAGAGGGGTGGCTC |
| 210010_s_at | SLC25A1 | 0.750588351 | GTGTGGAAGACGGACTAAGCCTAGA |
| | | | CTAGAGAGGCCGCAAGGGGACCGCC |
| | | | TGCAGTAGTGCCAAAAGGCCCCTTC |
| | | | TCTGTAGCCTGGTCTGTGCATTGTG |
| | | | GTGCATTGTGGCTGTCAAATCCATG |
| | | | CAGCCATGGCTGGATGTGCATCTGG |
| | | | GCTGGATGTGCATCTGGCCTATGAC |
| | | | TGCCTGTGTTTCATGTTCTGTGTCA |
| | | | TCATGTTCTGTGTCACGTGACCCTG |
| | | | CCTGGATGTGGCCATAGTGTTTGTC |
| | | | GAAGCTGCTCAACAAAGTGTGGAAG |
| 223222_at | SLC25A19 | 0.974852744 | GTTCTTCTCGTATGAATTCTTCTGT |
| | | | TTCTGTAATGTCTTCCACTGCATGA |
| | | | TCAGTCTCCACTGAGAGGTGCCGTC |
| | | | AAGCGGGGTAGCAGCCTTGAACCCA |
| | | | GGGACACCACCAGAAGGTCCAGGGC |
| | | | TCCAGGGCTCTCCCCATGAGAGAAT |
| | | | GGACGTGGTCTATGGTGAGCCAACG |
| | | | AACAGAACACACTCCTGGTCTGGAT |
| | | | GATGGGGCTGCTGCTTGAGTGCAGA |
| | | | CAGAGGGCTGCGGTAGGCCCTTTGC |
| | | | CTTTGCAGGAGTCAGGTCCCTACAC |
| 217122_s_at | SLC35E2B | −0.67710358 | GTCTCTGAAGTATTTCCTCCAGTTT |
| | | | GGGCCCCTATGTTTGAGTTTGATGG |
| | | | GGATCCTCACTCAACGAAAACTCGG |
| | | | CTCGGTTGGAAACTGTTCCGCCTGG |
| | | | GACTTGCTCATTTAGACTGTTCACG |
| | | | GAGTCTGAATCTGCCAACGTGGTGT |
| | | | TCAGGGCAACTTTCCCCATACAGGA |
| | | | TACATCAACAGTCTACGTCACAGCC |
| | | | GTGCTTTCTAGCAAACGGTTCTGTT |
| | | | TAGCGAGTCACTGTTGATTCTGCTG |
| | | | ATACCGTGTAACTAATCCCGTGGAT |
| 242367_at | SLC38A1 | 0.376727271 | AAATCATCTCTGCGGGCGTGAAAGC |
| | | | GTGCCCGATGCTTTCGGATGTTGCT |
| | | | GAAAAGTCCAGGTCTCCTGTGCTTC |
| | | | TTGTTTTCCTGTGACTTTGGTGTGT |
| | | | GATCTGGTTCCATTTTTACGAGAGC |
| | | | TTACGAGAGCCAGGAACCACGCACG |
| | | | GAGGTAAGGTGATTATCCGTTCCCG |
| | | | GCGACCGTGTTCTGGGAGTGTTTGA |
| | | | TGGTGAAAATTTCCTGTGTCCGCAA |
| | | | GTCCGCAAGGCCCAGAGGAGATCGT |
| | | | AGGAGATCGTGTGATGTCCGGGGGG |
| 200924_s_at | SLC3A2 | 0.42179558 | ACAGCCTATGGAGGCTCCAGTCATG |
| | | | GGCTCCAGTCATGCTGTGGGATGAG |
| | | | CTGTGGGATGAGTCCAGCTTCCCTG |
| | | | TTCCCTGACATCCCAGGGGCTGTAA |
| | | | GGGGCTGTAAGTGCCAACATGACTG |
| | | | AGCGGAGTAAGGAGCGCTCCCTACT |
| | | | TCCCTACTGCATGGGGACTTCCACG |
| | | | ACTGGGACCAGAATGAGCGTTTTCT |
| | | | GAGCGTTTTCTGGTAGTGCTTAACT |
| | | | TAACTTTGGGGATGTGGGCCTCTCG |
| | | | AACTGGAGCCTCACGAAGGGCTGCT |
| 223044_at | SLC40A1 | −0.72816035 | GGCAAGAATCCCAATTTAACTCATG |
| | | | GTAAGCCTTCAGCCTGGCAAGTTAC |
| | | | ACATGTAGAAAGCCCACACTTGTGA |
| | | | GTTATTTCTACATTGTTCTACAGCA |
| | | | AAAGTATCCCTTTCAAATGCCTTTG |
| | | | GCAACATGTCTGTACCAAGATGGTA |
| | | | GTACTTTGCCTTAACCGTTTATATG |
| | | | CACTTTCATGGAGACTGCAATACGT |
| | | | TGCTATGAGCACTTTCTTTATCCTT |
| | | | ATCCTTGGAGTTTAATCCTTTGCTT |
| | | | TTGCTTCATCTTTCTACAGTATGAC |
| 202111_at | SLC4A2 | 0.341046478 | GGCCTCTCCATAGTTATCGGGGATC |
| | | | TAGTTATCGGGGATCTGCTCCGGCA |
| | | | TTTCCTGTACATGGGAGTCACCTCC |
| | | | TCACCTCCCTTAACGGGATCCAGTT |
| | | | AGTTCTATGAGCGGCTGCATCTGCT |
| | | | CACCCAGATGTCACTTACGTCAAGA |
| | | | CGTATCTTCACCGACCGAGAGATGA |
| | | | GAGGCAGAGCCGGTGTTTGATGAGC |
| | | | ACAATGAGATGCCCATGCCTGTGTA |
| | | | ACAGCCGAGGGACCGATGGACGAGG |
| | | | GGACGAGGGGACAGGCTGGTGGGAT |
| 201349_at | SLC9A3 | R10.569257778 | AGAGAACTATGTTCTTCCCTGACTT |
| | | | GGAAGGTGAATGTGTTCCCGTCCTC |
| | | | CCGTCCTCCCGCAGTCAGAAAGGAG |
| | | | TCATGGGACCAGGCGAGAGGGCACC |
| | | | GATAAATGGGTCCAGGGCTGATCAA |
| | | | CTGCCGCTCTCAGTGGACAGGGCAT |
| | | | CATCTGTTATCCTGAACCTTGGCAG |
| | | | ACCTTGGCAGACACGTCTTGTTTTC |
| | | | TGGCCTCAGCCTTAAACTTTTGTTC |
| | | | GCAGCACGGGGAGGGTTTGGCTACC |
| | | | AGCCAGGTACCACCATTGTAAGGAA |
| 201320_at | SMARCC2 | −0.41120275 | TAATTTCGGGGATTTCTGTGGTAGG |
| | | | CCATGGACTCCTGGAAGGCACAGAG |
| | | | AGCACTTAAGCACCTCCATATTATG |
| | | | AAGCACCTCCATATTATGACTTGGT |
| | | | TATGACTTGGTGGGTCACCCCTTAG |
| | | | CCCTCTCCCACCAAGACTATGAGAA |
| | | | GACTATGAGAACTTCAGCTGATAGC |
| | | | GGGCTCCCCAGATGAGGATGCAGGG |
| | | | CTTCTCCCCTGTGACGGGAAGGCAG |
| | | | CGGGAAGGCAGGTGTGACTCCAGGC |
| | | | CCTTTCTTCTGTTCAAAGTTTTCTG |
| 212470_at | SPAG9 | 0.401936161 | TTCCCTCTATCCTTTTATTTAATGC |
| | | | ATATTACAAAATCCGTTCTACCATA |
| | | | AATCCGTTCTACCATAACAATACAG |
| | | | GTGTTACTGCACCAGTGTTATAGGT |
| | | | AGAATGTTTACTTCCTGCAAACTGG |
| | | | AAGCAATCCAGATGTGGTTTACTCT |
| | | | GGTTTACTCTGCCACAGTCTAATGT |
| | | | GCCACAGTCTAATGTCATTCACTTC |
| | | | GTCATTCACTTCATTTGATGGGGTC |
| | | | TGATGGGGTCACTTGTTAGCTGTCA |
| | | | GATGTATCTAAATGTCCCGAGAGGG |
| 207435_s_at | SRRM2 | −0.58358047 | CCTCCAGGTCTCCATAAATTGTCTT |
| | | | TGGAGCCACAAGGAGTGTCCCTTCT |
| | | | CCCCAGCAGAGCCGTGGGAGGGTCC |
| | | | TCTGCTCTCCTTTGAACCTTGGCAG |
| | | | TCCTGTGAAATGTTAATCTCCGTGA |
| | | | TAATCTCCGTGAGTTCTTCCTGGTT |
| | | | GGGGTGATTGTGATGGTGGTTGGGA |
| | | | TGGAATTAGTTGGTCCCTACTGTCC |
| | | | TACTGTCCCCCATGAGGTTGTGAAC |
| | | | TCCCCCATGAGGTTGTGAACCCCTC |
| | | | CTGTACAGCAAGAGCAACTTTTTCT |
| 208610_s_at | SRRM2 | −0.52612752 | CACGGGGCCATGTACAACGGGATCG |
| | | | GTGAGCGGCCTGACTACAAGGGAGA |
| | | | TGGTGAAGCGGCCTAATCCTGACAT |
| | | | TCGAGCTGCGATGCCTCGAGCTGGA |
| | | | GACCTTTCGACTCATGTTGCTGGAG |
| | | | GTCACGGAGACTCACCAGTTGGCAG |
| | | | AAGAATGAAAGACTCCGTGCTGCCT |
| | | | TCCGTGCTGCCTTTGGCATCAGTGA |
| | | | GATTCTTACGTAGATGGCAGCTCTT |
| | | | TCAGCGTCGTGCCCGAGAAGCTAAA |
| | | | GAAGCTAAACAACCAGCTCCTGAGC |
| 219919_s_at | SSH3 | −0.38068238 | GAAGAGGATCCACAACTCCTTGGAG |
| | | | GCCTGTCCAAGGGCTCAAGACTTTC |
| | | | CAAGACTTTCTAACTGGGATGTGGT |
| | | | TACCTTTGGGGGCAACAGCACCCTA |
| | | | TTCCTGGAACCAGCCAGGCCAGGCA |
| | | | GCCCCAGCCGCGGGAGGCTGGAAGG |
| | | | AGGCTGGAAGGGCTGGCAGATCGCT |
| | | | TGACACCACGCCAGATCACAGGGCA |
| | | | GGCACCAGGCCAGAGATAGTCTTCT |
| | | | TGGCCTCTGGCTAGTCAGTTTTTCA |
| | | | AGCCTTACAGTATCTGGCTTTGTAC |
| 204963_at | SSPN | −0.40007125 | AATTCTGAACTGTATCCATATTTTA |
| | | | GAACTTTATCAGTATGCTTTGTTGA |
| | | | TAATTGAGTTCAATTCGCCTCTCCG |
| | | | CCTCTCCGCATTGCCTATTGATACA |
| | | | GCATTGCCTATTGATACACTTTACT |
| | | | AAAACATTTTCCTGCTTGTCTTAGA |
| | | | GCGTTAAGTCGGTAAGCTAGAGGAT |
| | | | ATGTCCTCTAGATAAAACACCCGAT |
| | | | GACACATTGGAGAGCTTAGAGGATA |
| | | | ATCACACACAAAAGTTACACCAACA |
| | | | ACCTGTAAAATACCTTGTGCCCTAT |
| 204964_s_at | SSPN | −0.52431915 | GCTCCTCCCTGCTAGTCAGGGACAC |
| | | | GGATCATTGTCTGCTTAGTGGCCTA |
| | | | TGGCTTGTTTATGCTTTGTGTCTCA |
| | | | TTCGCAGCTCACACAGTTTACCTGT |
| | | | TTACCTGTGAGACCACACTCGACTC |
| | | | CACTCGACTCTTGCCAGTGCAAACT |
| | | | TCAGCAGGACCTTTGTTTACCGGGA |
| | | | CGGGATGTGACGGACTGTACCAGCG |
| | | | CTTGTTGGCCTGCTTTGTGATGTGG |
| | | | GTACCAGGTCTTCTATGTGGGTGTC |
| | | | GTGGGTGTCAGGATATGCTCCCTCA |
| 226932_at | SSPN | −0.42535696 | CTCAAATGATTATTATCCCCTTCAA |
| | | | ACTGGTCTGTACTTTGGTGTTGTGG |
| | | | ATGTTTTCTATTCATGTCCAGGGCA |
| | | | ACTTCCCTTTTTGCATGCAGTATGT |
| | | | AAAAGCTGCCCTGCAAAACCAATCC |
| | | | CAAAACCAATCCTTTCCTATCATGA |
| | | | GAAGAGTACCTTCATATTTTCTAGA |
| | | | GTCTCTGAACCGTTGCTACATAGCC |
| | | | GTTGGCTATCAGTTCTTGCTATTCT |
| | | | GTTCTTGCTATTCTCAGAGCACTCT |
| | | | AGAGCACTCTATCATGTTTTTAGGT |
| 237817_at | SSR3 | 0.476986005 | CTATGGGAATCTGTGTCCTTGCCTC |
| | | | AGAGCCAAAGCAAACCTGTCATTTT |
| | | | ACCTGTCATTTTTGATAGCTTCTGA |
| | | | GAAATAATAAGCCCCTGTACCTGTT |
| | | | GTACCTGTTATTTTTGGGCTCTGGG |
| | | | GGCTCTGGGGGTTGGGTGGATGGCC |
| | | | AATAGGTTCATTCCAGTGTATCTTA |
| | | | TAATAGTGTTTCAAGCTGCTGTTAA |
| | | | TGCTCTGGGAGTCAGTCCATTAAAT |
| | | | GGGCAAGAATCAGTCTTCTCTTATT |
| | | | GATGTTATCCAGGAATGTGCAGCCA |
| 203759_at | ST3GAL4 | 0.450622686 | TGCCAGTATGACCCACTTGGACTCA |
| | | | CCCTGGCTGCTCTTATGGAGCCGAG |
| | | | GGCTGCTCTTATGGAGCCGAGATCC |
| | | | GCCGAGATCCAGTCAGGGTGGGGGC |
| | | | CCAGTCAGGGTGGGGGCGCTGGAGC |
| | | | TGCCAGCACCAAGAGATTATTTAAT |
| | | | AGGCCAGTAGAGAATTCTGCCCACT |
| | | | ACCAAGGCCTAGACACGGCACTGGC |
| | | | GGGAAGAGCACTGGTGTGGGGGTTC |
| | | | TGGTGTGGGGGTTCCACCGAGAAGG |
| | | | CACCGAGAAGGGGACCTCATCTAGA |
| 224203_at | SUFU | 0.476269896 | TCTAACAGGTGCTCAACCTACTCCA |
| | | | CCACCACACTCCCGAGTGTCTTGGA |
| | | | GTCTTGGAGGGACAGCATCCTTTTT |
| | | | TCACCTCGCTCGCAAGTATCAAGAA |
| | | | GGTGGCCATACCTGGTTTGTGAATG |
| | | | TTGTGAGTTTCACCCAGTCTGGGGA |
| | | | GTCTGGGGAGTCTGTGAAGCATATG |
| | | | ACAGACACACTTTTTGTCCCTGCAT |
| | | | GCATGTCTACAGAATTTCTCCTCCT |
| | | | CAAACAAAGGACACCAACCACACTC |
| | | | CACTCCCCAGACTAAGCCGAGATAG |
| 206161_s_at | SYT5 | 0.439999734 | CAAGGTGCATCGGCAGACGCTGAAC |
| | | | TGAACCCTCACTTTGGGGAGACCTT |
| | | | GTCATGGCGGTGTACGACTTCGACC |
| | | | TGACGCCATCGGGGAGGTGCGGGTC |
| | | | CCGTCATCGTCCTGGAGGCTAAAAA |
| | | | CAGATCCATACGTCAAGGTCCACCT |
| | | | AAGAAGAACACTCTGAACCCCTATT |
| | | | ACCCCTATTACAACGAAGCTTTCAG |
| | | | GAAGCTTTCAGCTTCGAGGTGCCCT |
| | | | CTCGGACCCCTATGTGCGGGTCTAC |
| | | | GGAGGCGGTACGAGACCAAGGTGCA |
| 206162_x_at | SYT5 | 0.370742661 | CCTGTGACCAAGTCCAGAAGGTGCA |
| | | | AAGGTGCAGGTGGAGCTGACCGTGC |
| | | | CTGACCGTGCTGGACTACGACAAGC |
| | | | CTGGACTACGACAAGCTGGGCAAGA |
| | | | GCTGGGCAAGAACGAGGCCATCGGG |
| | | | AAGAACGAGGCCATCGGGAGGGTGG |
| | | | GGCCATCGGGAGGGTGGCCGTGGGG |
| | | | CCCAACGATGCCAATCACGACAACT |
| | | | TGCCAATCACGACAACTTTCCAGCA |
| | | | GACCCCGGGAAGGGAAGGCAGCCTG |
| | | | AAGGGAAGGCAGCCTGGTTTCTCCT |
| 202813_at | TARBP1 | −0.55713006 | ACCTAACCCAATATTGCTTTCCTGA |
| | | | TTGCTTTCCTGAGAAATCTCTGCTC |
| | | | GGAATTCCAGCAAATCTGATCCAAC |
| | | | GTGTGGAAATTCCTCAACAGGGCAT |
| | | | CAACAGGGCATTATCCGCTCCCTGA |
| | | | CGCTCCCTGAATGTCCATGTGAGTG |
| | | | GTCCATGTGAGTGGAGCCCTGCTGA |
| | | | GAGCCCTGCTGATCTGGGAGTACAC |
| | | | ATCTGGGAGTACACCAGGCAGCAGC |
| | | | CTCGCACGGAGATACCAAGCCATGA |
| | | | TGATGTGCCTTCCTTAGTGAACTGC |
| 213877_x_at | TCEB2 | 0.69305787 | AGAGATTTGGGAGTCTGCCTGGTTG |
| | | | TTTTGGGGCTTGTGCTTGGCAGTTC |
| | | | ATCCTGAGACCCTGGCTGAGAACTT |
| | | | TGCTGCTTAAAGGCACCATGGGGAC |
| | | | CCTCAGACCCAAGCCATTGTTAGCA |
| | | | GAGACACAAAGACCAGAGCCAGCCT |
| | | | GCCAGCCTCAGGGACAAGAGATTCC |
| | | | AGAGATTCCAGTTTTAGGCCTTTCT |
| | | | GCTGGAGCCAGTGTCCTGGTTTGAC |
| | | | CACCCACGCTGGGGGCTGTAATCAC |
| | | | ATCACGGAGGGAAGTGGCTGCCCCC |
| 218099_at | TEX2 | 0.440263979 | TGACAGGATGGGTCCTCTCATACAG |
| | | | TTTTTCCATCTGGCGTTTCTGTGTC |
| | | | GTTTCTGTGTCCTCCAGGTTTATAT |
| | | | GGGAGAGTTCCATGGGCAGATTTCC |
| | | | GAAGGCCAAAACGGAGAACTGCTCT |
| | | | AGACCAAAAGTTTGCTCAGCATCAC |
| | | | TCAGCATCACACTACATCTCAAAAT |
| | | | TAGTTTACAAGGTTGGGGGCTCTCT |
| | | | GGGCTCTCTTTGCTTCGAGAAGTAA |
| | | | GCTGCATTCAACGTCAAAATTACCT |
| | | | GCACCTTGCCTGAACATGACTTTAA |
| 218996_at | TFPT | 0.66617142 | GGCGGCGCCAGCGGGAATTAAATCG |
| | | | AAAGTACCAGGCACTAGGTCGGCGC |
| | | | GCGCTGCCGGGAGATCGAGCAGGTG |
| | | | AACGAGCGGGTCCTGAACAGGCTCC |
| | | | GGTTCCTCATGAGAGTGCTGGACTC |
| | | | GCTGGACTCCTACGGGGATGACTAC |
| | | | CAGCCAGTTCACCATTGTGCTGGAG |
| | | | GCCGAGCAGGAAATGCGCTGACTCC |
| | | | TGGCCCCGGTGCAGATTAAGGTTGA |
| | | | CCTGGATTCCAGTTGGGTTTCTCGG |
| | | | TCGGGGTCCAGACAAACTGCTGCCC |
| 216262_s_at | TGIF2 | 0.532627427 | TCGCCCATCTGTTGCTGTGGGAGTG |
| | | | GTGGGAGTGTGAACGGATCGCTGAA |
| | | | GCTTTGCTCTCTCTAGGTGGGCAAG |
| | | | CCGTGTGCCCCAGGGGGATCAGGGA |
| | | | GAACATGGCTTCATCCAGGTTAACT |
| | | | ATCCAGGTTAACTGATGCTGCCATT |
| | | | GGATGCCTGTAGTAGGGAACTCTGG |
| | | | TGGGCTGAGGTGGGATTTTCCCTCC |
| | | | GTGAGGGAGCCATGCTGCTGAATTC |
| | | | CTGGTTGGCATTTCCCCATTATGTA |
| | | | GTGTTGGGTAGGGCAGACTCTGCTT |
| 218724_s_at | TGIF2 | 0.403591471 | GCCTCCGCTCAGTGATGAGACCAAG |
| | | | GAGATCGGAGACAAGCATGGTGCTG |
| | | | GCTGGGCTCAGGAAAGCTGCCAAAT |
| | | | TTCAGTCCTATGTTGGGTCCAAGCT |
| | | | CTGTGCTGTTTCTGTCAAGCCAGGT |
| | | | GGACATTCCAAGTTCATATGCGTGA |
| | | | GGATGTAACAGAACCGACTCCAGTT |
| | | | GCTGTGGTTTGCATTCACGGCAGTA |
| | | | CACGGCAGTAGTTAGCCCAGGTGTG |
| | | | GAGTGCACTGCATGATAGCGTTCTG |
| | | | GGACCAGCTAAGTCTCTGCAGTAGT |
| 212910_at | THAP11 | 0.435755307 | ACACCAGCAATTATGACTTTGTCTA |
| | | | GAGGCTTCAGAACCACTGAACTTGA |
| | | | TGAACTTGAAACTTACCCTCTAGGG |
| | | | GGGATGCAGGTGGGATGTCCAGGGA |
| | | | GGTTGGTCAGCAGTCAGACAACTCT |
| | | | TGGGGACTGGTAAATCTGTGCCTCT |
| | | | GCCTCCTAGGACTTATTTTCCCAGG |
| | | | ATTTTCCCAGGAGGCCATTTACAAG |
| | | | AAGGGGATCTGGATGACCTGCTGAT |
| | | | GATCCAGCTTGCCAGGGACTTAGGT |
| | | | CCTGTTTTGTTTGCTACTGGTTACA |
| 222835_at | THSD4 | −0.4286182 | AAAAGCCCAGATTTCGGTAGCCATC |
| | | | TTTCTGCTTTCTTAGTGCCCATTAT |
| | | | TTTTTTCTTGGCCTGTGTACGGGAT |
| | | | TGTGTACGGGATTGCCTCATTTCCT |
| | | | CCTCATTTCCTGCTCTGAATTTTAA |
| | | | AAAGCTGTCATATGGTTTCCTCACA |
| | | | TAGTTTGCCGTTTTACTTTCATCCA |
| | | | AAGGAAATTGTGCCTCTTGCAGCCT |
| | | | TTAGTACTATCGATTCTTTCCACCC |
| | | | GACTTGCGGTTCTCTCTGTAGAAAA |
| | | | GAGTCAGTTCAGTTCCGTAAAGGTA |
| 226506_at | THSD4 | −0.37638707 | TAATCAGTCCAGTTCCCTGAGGTTT |
| | | | TACTCTGCTTTTCGACTCATTCAGG |
| | | | GTAGCATTGTACCTGAACCTGATTG |
| | | | TGGGAGGGTGTCTGTTATCCCTTTC |
| | | | CTTTGTCCCCGTTGTTAGACTGGCA |
| | | | TAGACTGGCAGCGTCAGTTGCTCGG |
| | | | GCCGTGGGTGAGGCAGGTGGCTGGC |
| | | | TGGCATTTACTGCTCTGACACTTCC |
| | | | CTGTGGGGCCTGTGAACTGCACAGC |
| | | | CAGCCAGGAGCAAGGAACCCACTAA |
| | | | CATGTCCCCTCTACAGTGTTAAATT |
| 232944_at | THSD4 | −0.44465042 | GCAACTGCCACATAATTGCCAAAAC |
| | | | AAATGAGCCATCACGTCACAAAGAG |
| | | | GGCGGTGAAACTACTCTGTGTGATA |
| | | | TACACTGGCGGATGCATGTCACTGT |
| | | | GCACTTGTCCAGACCCACAGAATGT |
| | | | GACCCACAGAATGTGCACTCCGAAG |
| | | | ACTCCGAAGTGTGAACCCTCGTATG |
| | | | GAACCCTCGTATGGACTATGAACTC |
| | | | GACATGTCCGTGTAGGGTCATCAGT |
| | | | AGGGTCATCAGTTACACATGTACCA |
| | | | TGGTAGTAAGGGACCCTGTGCCTGT |
| 224560_at | TIMP2 | −0.40585268 | TTGTTTTTGACATCAGCTGTAATCA |
| | | | CATCAGCTGTAATCATTCCTGTGCT |
| | | | CCCTTGGTAGGTATTAGACTTGCAC |
| | | | AACGCGTGGCCTATGCAGGTGGATT |
| | | | GGCCTATGCAGGTGGATTCCTTCAG |
| | | | TGCAGGTGGATTCCTTCAGGTCTTT |
| | | | ACAGGTTAAGAAGAGCCGGGTGGCA |
| | | | GTTAAGAAGAGCCGGGTGGCAGCTG |
| | | | GTGGCAGCTGACAGAGGAAGCCGCT |
| | | | GAGGAAGCCGCTCAAATACCTTCAC |
| | | | GAAGCCGCTCAAATACCTTCACAAT |
| 231579_s_at | TIMP2 | −0.44946961 | GAGTAGGTTCGGTCTGAAAGGTGTG |
| | | | GGCCTTTATATTTGATCCACACACG |
| | | | GATCCACACACGTTGGTCTTTTAAC |
| | | | CACGTTGGTCTTTTAACCGTGCTGA |
| | | | ATTTTCATCCTGCAAGCAACTCAAA |
| | | | ATTTTCAAATCTTTGCTTGATAAGT |
| | | | TGGACTTGCTGCCGTAATTTAAAGC |
| | | | CTGCCGTAATTTAAAGCTCTGTTGA |
| | | | GGAGCACTGTGTTTATGCTGGAATA |
| | | | ATGAAGTCTGAGACCTTCCGGTGCT |
| | | | ACCTTCCGGTGCTGGGAACACACAA |
| 228505_s_at | TMEM170A | 0.464931043 | CAGCTATTGCTGGAGTTTACCGAGC |
| | | | GGAGTTTACCGAGCAGCAGGGAAGG |
| | | | ATGATACCATTTGAAGCCCTCACAC |
| | | | GCACTGGACAGACATTTTGCGTCTT |
| | | | TTTTTACGGATTTTAGCTACTCTAT |
| | | | GCTACTCTATAGCATACATCCTTAT |
| | | | GAGTGTAGTGTTTTCTTAGTTCTTC |
| | | | ATTGAAGACTTATGTGGACTCCTAT |
| | | | GGACTCCTATTGTTCTCAACCAAAA |
| | | | TAAGCAGTTTTCATGTGTACCTTTA |
| | | | TACCTTTACCCAAGCCAAGTCAACA |
| 227733_at | TMEM63C | −0.4519704 | TCCAGTGTAGCCTGGCTCTGAGAGA |
| | | | TGGAGAAGGTTCCATAGTCCACTCT |
| | | | TAGTCCACTCTTAGGGGAACCAGCA |
| | | | CATGGTCACTACAGGATGGTGGAGC |
| | | | ATGGTGGAGCAGGGGGCATCTTTTA |
| | | | AGGAACCGGTATTGCCTAGAGCCTC |
| | | | ACTGCCCCTGGAAGCAAAGTGCCTA |
| | | | AAAGTGCCTATCAGCAGCGTTGCGT |
| | | | GAATGTGCCAGAATGCTGAACCTTC |
| | | | GCTGAACCTTCTTGTTAATGCTATG |
| | | | TAATGCTATGACCGTGCCTTGAATA |
| 240261_at | TOM1L1 | 0.452804108 | TGAGAGTCTCACTTTATAAAATGGG |
| | | | AAATGGGAACAATGATTGCCTTAAA |
| | | | ATTGCCTTAAAGGGTGGTTGTCAAG |
| | | | GTAGCAAAGCTTACAATGCATTTTA |
| | | | GAGTTACCTATCTTACCTGTTATCT |
| | | | GTTACCTATCTTACCTGTTATCTTC |
| | | | TATCTTACCTGTTATCTTCTGCTGT |
| | | | GTCCTTATTCCCAGCAAGGGTTTGG |
| | | | TATTCCCAGCAAGGGTTTGGCAAAT |
| | | | AAAACACAGGCTTTAAAGTCAGAGA |
| | | | CCTCTCAGCCACCTAACTTTTGAGA |
| 212408_at | TOR1AIP1 | −0.8187163 | GGAGTGCCTCAAGCCAAGATAGTGA |
| | | | ATAATTGAGCTTTCTCATCTGTCAA |
| | | | TCTGTCAAATGCTATGGTTTTCTTA |
| | | | CTAGATCTATCCACCTTGTTTTTTT |
| | | | AGAGTCAGTCATTGGCTTTGTCATT |
| | | | GGCTTTGTCATTTACCCTTTGAGAG |
| | | | ACCCTTTGAGAGTTCCACAAGTGGT |
| | | | TAGAGTGGTTTAACGTCTTTCCTCT |
| | | | GTCTTTCCTCTAGTACTACCAGTAT |
| | | | AATGTATACCCCTTACTGTAATTTG |
| | | | GTTCCTCTTAGAAGTCAGATCATCT |
| 212409_s_at | TOR1AIP1 | −0.60653651 | CAGGCTCTACTTTGATCTTCTACAA |
| | | | AGATGTAGCCTTAGTCCTGACTGTC |
| | | | CAAGTTCACCAATTCTAACACACCC |
| | | | ACACCCAACTCCTACAATCATATGG |
| | | | AATGGCCTCTGGAGCCGTATTTCTC |
| | | | TTCTCACTTAGTTCTGCCTGTGCAA |
| | | | GCCTGTGCAACCTGAAAATGCCCTG |
| | | | GAAAAATCATGTCCCAAGTTCTGAG |
| | | | AGTTCTGAGAATTGTTCACACTTTC |
| | | | TTCACACTTTCTAACCAGAGACAGA |
| | | | GAGACAGAATTCAGAGCTCTTTTTG |
| 216100_s_at | TOR1AIP1 | −0.61552544 | TTCAGTTTCCATTGAGAGCTCTGTT |
| | | | AAGGTATCTTAGGAGTGCAGATTAT |
| | | | TTTGATTCTGGGCTGAGTTATTACA |
| | | | GTTATTACAGTTATGGTATGACCAG |
| | | | TCCTTTCTTATGAACCTTCCTGATT |
| | | | GATTTTTTAACTTAGATTTCTCACT |
| | | | GATTTCTCACTAAGTTTCCTGAGTT |
| | | | AAGTTTCCTGAGTTATTAGTAAGAT |
| | | | CATTTAGGTGTGAGTTCCTTAGCTT |
| | | | CCTTAGCTTCTGCCTATAGGAACAT |
| | | | ATGAAAGGTCATCTAGGTGTGTGTT |
| 203511_s_at | TRAPPC3 | 0.419413644 | TGGGCTTTAACATTGGAGTCCGGCT |
| | | | GAAGATTTCTTGGCTCGGTCAAATG |
| | | | GGCATCACTCCAAGCATTACTAATT |
| | | | GCCCAGCTGGTGATGAATTCTCCCT |
| | | | GGAACTTCCTGATAACCACTCATCC |
| | | | TCCAATCTCTTGTGTGGGGTGTTGC |
| | | | GGTGTTGCGGGGAGCTTTGGAGATG |
| | | | TTGAGGACAATCTTCCAGCTGGAGA |
| | | | GAGGAATAACCATCCCTACAACTCG |
| | | | TGTTGGAATCAGCAGGCCTCTGTGC |
| | | | TCTTATAACCTGTTTCCATTCTCCA |
| 207305_s_at | TRAPPC8 | −0.475685 | AGTCAGCAGAATTCCATGCCTGCCC |
| | | | GCCTGCCCTGATCATCATCAGTAAT |
| | | | GATATCTGATCCCTGCAAAATACTT |
| | | | GATATCAGCATATTTGTGCACCTTA |
| | | | TGCACCTTATTAAGCCCCATCTTAA |
| | | | CAAAGTCTAAGTCTGCTGTTACAAC |
| | | | GAAAGGCCTTGTTGGCAGTACTCCT |
| | | | GCAGTACTCCTGTTAAGCCATTAGT |
| | | | AAGCCATTAGTCTCTAAATTCCAGC |
| | | | TGCTTCACACAGTTCCTTAAAATCA |
| | | | GAACTTTGGTCATAGAGTCTTCATA |
| 206911_at | TRIM25 | 0.464816775 | ACCAAGATCTCTGCCTGGCACAATA |
| | | | TCTCAACTGTGACCACGGCTTTGTC |
| | | | TTGCCGACAAGGTCCACCTGATGTA |
| | | | CTCCCCCAAGTAGGCAGGCTGTAGG |
| | | | GCTGTAGGCACTTGGGCTGACTGCC |
| | | | ACAGCAGGCAGAACTCTCCTTGGAT |
| | | | TTGTGGGCGAGGAGGCGTTTCCACC |
| | | | TATCAGGGCAGGGTGACCTACTCCC |
| | | | CCTACTCCCCATTGTTCTGGAAATC |
| | | | TGGAAATCTCCAGGCTGCTGGGCAG |
| | | | TGAAGTCATGAGTGCCCGATTCCTC |
| 223109_at | TRUB2 | 0.343758497 | GTGCGGGGCAGTGAATGCCCAGGCA |
| | | | GAAGAACTGCTATGAGCTGGACCTG |
| | | | GCTGGACCTGATAGCTGTGCAGAAA |
| | | | GTGAGAGCAGGGGCACCTTTTCTAC |
| | | | GGCACCTTTTCTACGTGTGACACAA |
| | | | AATGGACTTGACCCAACTGAGAAGG |
| | | | AAGTATTGGCAGACCAGGCGTGGTG |
| | | | TAGTGCGCTAGACGGCGCCTGTGAA |
| | | | CAGTGGGACCTAACCAACATCCAGG |
| | | | ACATCCAGGATGCTATCCGGGCTGC |
| | | | GGATGGTCCTGGGACTCCCAGGGCC |
| 218245_at | TSKU | 0.328423261 | CATCCAGACTGGAAACCTACCCATT |
| | | | TGAGCATCCTCTAGATGCTGCCCCA |
| | | | ATGCTGCCCCAAGGAGTTGCTGCAG |
| | | | TGCAGTTCTGGAGCCTCATCTGGCT |
| | | | ATCTGGCTGGGATCTCCAAGGGGCC |
| | | | TTACCCTCCCAGGAATGCCGTGAAA |
| | | | TAACGGAGTGTCACTTTCAACCGGC |
| | | | GTAATATTGTCCTGGGCCTGTGTTG |
| | | | GGGAAGCTGGGCATCAGTGGCCACA |
| | | | AGTGGCCACATGGGCATCAGGGGCT |
| | | | TCATCTATCTAACCGGTCCTTGATT |
| 201090_x_at | TUBA1A | 0.90557475 | AATACATGGCTTGCTGCCTGTTGTA |
| | | | ATGTCAATGCTGCCATTGCCACCAT |
| | | | AACCAAGCGCACGATCCAGTTTGTG |
| | | | TGCCCCACTGGCTTCAAGGTTGGCA |
| | | | AAGGTTGGCATCAACTACCAGCCTC |
| | | | ACACCACAGCCATTGCTGAGGCCTG |
| | | | GCCTGGACCACAAGTTTGACCTGAT |
| | | | GACCTGATGTATGCCAAGCGTGCCT |
| | | | GGCCCGTGAAGATATGGCTGCCCTT |
| | | | CTAATTATCCATTCCTTTTGGCCCT |
| | | | GTCATGCTCCCAGAATTTCAGCTTC |
| 211058_x_at | TUBA1A | 0.913630736 | ATGTCAATGCTGCCATTGCCACCAT |
| | | | TGCCCCACTGGCTTCAAGGTTGGCA |
| | | | AAGGTTGGCATCAACTACCAGCCTC |
| | | | CTCCCACTGTGGTGCCTGGTGGAGA |
| | | | ACACCACAGCCATTGCTGAGGCCTG |
| | | | GCCTGGACCACAAGTTTGACCTGAT |
| | | | GACCTGATGTATGCCAAGCGTGCCT |
| | | | GGCCCGTGAAGATATGGCTGCCCTT |
| | | | CTAATTATCCATTCCTTTTGGCCCT |
| | | | GTCATGCTCCCAGAATTTCAGCTTC |
| | | | TGTCTTTTCCATGTGTACCTGTAAT |
| 213646_x_at | TUBA1A | 0.827697475 | AAATGTGACCCTCGCCATGGTAAAT |
| | | | AATACATGGCTTGCTGCCTGTTGTA |
| | | | ATGTCAATGCTGCCATTGCCACCAT |
| | | | TGCCCCACTGGCTTCAAGGTTGGCA |
| | | | AAGGTTGGCATCAACTACCAGCCTC |
| | | | ACACCACAGCCATTGCTGAGGCCTG |
| | | | GCCTGGACCACAAGTTTGACCTGAT |
| | | | GACCTGATGTATGCCAAGCGTGCCT |
| | | | GGCCCGTGAAGATATGGCTGCCCTT |
| | | | CTAATTATCCATTCCTTTTGGCCCT |
| | | | GTCATGCTCCCAGAATTTCAGCTTC |
| 209251_x_at | TUBA1C | 0.858467073 | AAATGTGACCCTCGCCATGGTAAAT |
| | | | ACATGGCTTGCTGCCTGTTATACCG |
| | | | TATACCGTGGTGACGTGGTTCCCAA |
| | | | ATGTCAATGCTGCCATTGCCACCAT |
| | | | TGCCCCACTGGCTTCAAGGTTGGCA |
| | | | TTGGCATTAATTACCAGCCTCCCAC |
| | | | GCCTGGACCACAAGTTTGACCTGAT |
| | | | GACCTGATGTATGCCAAGCGTGCCT |
| | | | CGTGAGGACATGGCTGCCCTTGAGA |
| | | | GTGTGCTGTACTTTTACACTCCTTT |
| | | | TACACTCCTTTGTCTTGGAACTGTC |
| 211750_x_at | TUBA1C | 0.783244822 | AAATGTGACCCTCGCCATGGTAAAT |
| | | | ACATGGCTTGCTGCCTGTTATACCG |
| | | | TATACCGTGGTGACGTGGTTCCCAA |
| | | | ATGTCAATGCTGCCATTGCCACCAT |
| | | | TGCCCCACTGGCTTCAAGGTTGGCA |
| | | | TTGGCATTAATTACCAGCCTCCCAC |
| | | | GCAATACCACAGCTGTTGCCGAGGC |
| | | | GCCTGGACCACAAGTTTGACCTGAT |
| | | | GACCTGATGTATGCCAAGCGTGCCT |
| | | | CGTGAGGACATGGCTGCCCTTGAGA |
| | | | TACACTCCTTTGTCTTGGAACTGTC |
| 212639_x_at | TUBA1C, | 0.804293444 | AAATGTGACCCTCGCCATGGTAAAT |
| | TUBA1A | | CCGTGGTGACGTGGTTCCCAAAGAT |
| | | | ATGTCAATGCTGCCATTGCCACCAT |
| | | | AGTTTGTGGATTGGTGCCCCACTGG |
| | | | CTCCCACTGTGGTGCCTGGTGGAGA |
| | | | GAGAGCTGTGTGCATGCTGAGCAAC |
| | | | GCCTTTGTTCACTGGTACGTGGGTG |
| | | | GGCCCGTGAAGATATGGCTGCCCTT |
| | | | CTAATTATCCATTCCTTTTGGCCCT |
| | | | GATCACCAATGCTTGCTTTGAGCCA |
| | | | GCTTTGAGCCAGCCAACCAGATGGT |
| 201266_at | TXNRD1 | 0.770640577 | ACACGTGCTTGTGGACATCAGCCTC |
| | | | CCTGCCAGCAGTTCTTGAAGCTTCT |
| | | | ACCTGTATTTCTCAGTTGCAGCACT |
| | | | CCCATGCATCTGCCTGGCATTTAGG |
| | | | TGGCATTTAGGCAGCAGAGCCCCTG |
| | | | TCCTCATCTCATTTGGCTGTGTAAA |
| | | | GCAATTGAGGCAGTTGACCATATTC |
| | | | TCCAAGTCCACCAGTCTCTGAAATT |
| | | | GGAGTGGAATGTTCTATCCCCACAA |
| | | | TAGACTTGTCTTGTTCAGATTCTGT |
| | | | TCAGATTCTGTATTTACCCATTTTA |
| 209103_s_at | UFD1L | 0.84218285 | AAGTGAGGACTGTTGGCTGATTGGA |
| | | | AAACGCACTTAGGAACTTTGCCTGT |
| | | | GTCTGACCACCGGGGATGTGATTGC |
| | | | ACGAACTGCGTGTGATGGAGACCAA |
| | | | GAGACCAAACCCGACAAGGCAGTGT |
| | | | GTGTGACATGAACGTGGACTTTGAT |
| | | | TGCTCCCCTGGGCTACAAAGAACCC |
| | | | GACAAGTCCAGCATGAGGAGTCGAC |
| | | | CGCTTTCTCTGGATCTGGCAATAGA |
| | | | CCCTCCCCAATCAAGCCTGGAGATA |
| | | | TCACGTCCCCTTGTCAAAAAGGTTG |
| 206031_s_at | USP5 | 0.420391882 | CGCCCAAGGACCTGGGCTACATCTA |
| | | | GCTACATCTACTTCTACCAGAGAGT |
| | | | AGAGTGGCCAGCTAAGAGCCTGCCT |
| | | | TGCCTCACCCCTTACCAATGAGGGC |
| | | | CAATGAGGGCAGGGGAAGACCACCT |
| | | | AGACCACCTGGCATGAGGGAGAGGG |
| | | | CTGAGGGATGGACTTCAGCCCCTCT |
| | | | GGAGGCCGTGGGAGAATGGCTGGGC |
| | | | GGGGCAGCGATAGACTCTGGGGATG |
| | | | GTAAGGAGACTTTGTTGCTTCCCCT |
| | | | TGCGCGTGGGTGTAGCTTTGTGCAT |
| 218495_at | UXT | 0.496966797 | GAGAAAGTGCTGCGCTACGAGACCT |
| | | | GAGACCTTCATCAGTGACGTGCTGC |
| | | | GCAGCTGGCCAAATACCTTCAACTG |
| | | | GGATTTGGGCTGTAACTTCTTCGTT |
| | | | TCTTCGTTGACACAGTGGTCCCAGA |
| | | | CCAACCGTTCTTATTGCTGGCGGCC |
| | | | ATACTTCACGCATCTATGTGGCCCT |
| | | | GACACTGGCAGAAGCTCTCAAGTTC |
| | | | AAAGCCCATATCCACATGTTGCTAG |
| | | | ACAAGGCCTGCAGAATTTCCCAGAG |
| | | | TTCCCAGAGAAGCCTCACCATTGAC |
| 217821_s_at | WBP11 | 0.39110667 | ACCCAACTTGATTCAGCGACCCAAG |
| | | | GCGACCCAAGGCGGATGATACAAGT |
| | | | GATACAAGTGCAGCCACCATTGAGA |
| | | | GAAAGCCACAGCAACCATCAGTGCC |
| | | | TGCCAAGCCACAGATCACTAATCCC |
| | | | CAGAGATTACTCGATTTGTGCCCAC |
| | | | GAATAAAGGGGCTACTGCTGCTCCC |
| | | | AAAGCAGCACCCAAATCTGGTCCTT |
| | | | TGTTCCTGTCTCAGTACAAACTAAG |
| | | | GCTACTGTGACAGCTTTTGATGCCA |
| | | | GGCTTCTGTTCACAACAGTGGCCCA |
| 217822_at | WBP11 | 0.456975255 | TAGCCTTGTTCAGAATTTACTGCAC |
| | | | AAAAGGGTATTTCATCCAGAATAGA |
| | | | GATCAGTTATTGAAGCAGTGCTGCT |
| | | | AAGCAGTGCTGCTAACATCCATTCC |
| | | | CCTCCTCCAGTTCTTTGGAAATTTG |
| | | | GATCGGGGGATCTTAGTTGCTTATT |
| | | | TGCTTATTTGTTTTGACTCTTGTGT |
| | | | TGACTCTTGTGTGCTGTGGGCACTG |
| | | | GTGGGCACTGGAGTAGAGATTTCTG |
| | | | GGATCACAATGTCATTTCCTAATAC |
| | | | TATTTCCCACTGACCTAAACTTTCA |
| 217734_s_at | WDR6 | −0.50751083 | GCTCAGCATGCCTTGAGGGGAGGAG |
| | | | CGTGGGTTCCTGATGTCGGTGCAGG |
| | | | GATGACTTTGTGAACATTCCCAGGT |
| | | | CATTCCCAGGTATTGGAGCCTCTGT |
| | | | TGGAGCCTCTGTGGCCTTAAATGTG |
| | | | TGGAGGGAGACCCAGCATAGCCAGG |
| | | | TAGCCAGGCCAGTATGGAGCACCTC |
| | | | CTCACGCACAGCTCTCAGAAGCTGC |
| | | | GCTGCAGGCGGACGAACATCTGACC |
| | | | AAAGAGGTGTGGTCGAGGCTCCTGA |
| | | | ACAGAGACTGAGTCACTGGCCCATC |
| 219520_s_at | WWC3 | −0.45058724 | TATGTTTCAATCTGTCCATCTACCA |
| | | | ATCTACCAGGCCTCGCGATAAAAAC |
| | | | GTCTCAAAACCATCAGGATCCTGCC |
| | | | TCCTGCCACCAGGGTTCTTTTGAAA |
| | | | GGCTTTCACTTCATCTAATCACTGA |
| | | | AAGGAAGGCCAGAGAGCCGCGCAGT |
| | | | GACACCAAGCGCCCTATGTTGCTTG |
| | | | TGACGTGGTCTTGGAGCTTCTGACT |
| | | | TCTGACTAGTTCAGACTGCCACGCC |
| | | | GAAAATACCCCACATGCCAGAAAAG |
| | | | GTGAAGTCCTAGGTGTTTCCATCTA |
| 225273_at | WWC3 | −0.3762162 | GACGAACCCTTCGCTATAAGCAGTC |
| | | | ATAAGCAGTCATGCAGGTCTTCCCT |
| | | | TGGAGCTGGATCTCCAGGCGTCGAG |
| | | | GCCGAGCGGCAGACAAGACAGACCA |
| | | | GACTACCGTCATGAGCAGGCGGCTG |
| | | | GCCTCCAAGGAGATCTACCAGCTGC |
| | | | CAAAGAGCCCATCCAAGTGCAGACC |
| | | | GATAGCATTCTTCACAAGGCCAAGG |
| | | | GGCCAAGGATCAACATACCTCCTCT |
| | | | TCCCAGCCGACGACGTCTGATGGAG |
| | | | GAAGTATTTATCCACCTGTTTTATT |
| 212637_s_at | WWP1 | 0.331826249 | TGGATAGAACCATAACTTACACATG |
| | | | AAGTCATATACTAGATCCAATACTA |
| | | | GGAAGGATTCATTGAGCAGCATAGA |
| | | | GTTTGTTTACATGTTACTTTGAGAT |
| | | | CTTTGAGATGCTAGGTATTTGTGGA |
| | | | AAGAATCAGGCTCTTTTGTACTTTG |
| | | | GTTTTTAAATCTGTGATGCTTTTCA |
| | | | AATTGATGCAATTTCATACTTAGGA |
| | | | ATGTAAACTCTGCCACTTTTTTGTG |
| | | | GGTTTTTATGAAGCCAGATGGATTG |
| | | | AATATAAGGCTAATGATTTTCTGTT |
| 209375_at | XPC | −0.38045811 | AACTGAGGCAGCATGCACGGAGGCG |
| | | | AGGGGAGACGAGGCCAAGCTGAGGA |
| | | | AGCCCTTGTCAGATTCACCCAGGGT |
| | | | TTGCTAGGAGATACTCTTCTGCCTC |
| | | | GGAAGCCACCGGGAGATTTCTGGAT |
| | | | TGAATGCGCTGATCGTTTCTTCCAG |
| | | | CCAGTTAGAGTCTTCATCTGTCCGA |
| | | | TCATCTGTCCGACAAGTTCACTCGC |
| | | | TCAGGCTTACTAATGCTGCCCTCAC |
| | | | CCCTCACTGCCTCTTTGCAGTAGGG |
| | | | GGTCATCTGCTGGGATCTAGTTTTC |
| 217781_s_at | ZFP106 | −0.41254534 | GTTGTGGTGGAGGTGATTTGGGATA |
| | | | GGGATAGACTAGGTTTCCTTATGCA |
| | | | TGAGCTCCTCATAGAAACCAGACCT |
| | | | TTAGACAGTAACCTCTAACCTCACC |
| | | | CAAGCCCAAGTATATGGCCCTGCTG |
| | | | GGTTACCTGGTGACTACATTTCCCA |
| | | | ACATTTCCCAGATTCACTCTAAATT |
| | | | TATATGCCCTAGAGCTGCTCCAGCA |
| | | | GAAATCAGATGACACCTGACTGCAA |
| | | | GCAAATAGCCTTCTTACATTTTGGT |
| | | | CAAATCATCAGGTTCCTCGGGTTTA |
| 218490_s_at | ZNF302 | −0.59157756 | GAAAAATCTGTGTACATGTAGCAAA |
| | | | TAGGAATCTCCTGCAAACTCCTACA |
| | | | TTCCAAGTGCATCCCTTATTCTATA |
| | | | AGAGATGCAGCAAAGTGTTCACTAA |
| | | | GTTCACTAAGAGTGTTTATCTTGCC |
| | | | GAATGGTAGAGCAACCTGAAGGATT |
| | | | AAATCTTTGCAGTTATGCTATTTGT |
| | | | GCAGTAGCTTGCAGTTTCAGTTGAG |
| | | | GTTTCAGTTGAGTTCTACTTAGAAA |
| | | | GAAATTCTTTTTAGCTAGTGGGCAT |
| | | | GATATTTAGTCACCCAGAGGAGCCA |
| 229817_at | ZNF608 | −1.0089439 | GTATCAGTGTGCCTGAACCTTGCAT |
| | | | TGAACCTTGCATATCCTTCACATAT |
| | | | TTCCCATAAGCCCCTCAGAAAGGCT |
| | | | TTAGATGTCTATTTGGTGGCTCCTG |
| | | | GTGGCTCCTGTTAAAGACGCACCAG |
| | | | GACGCACCAGTGTAAAATGTTCCTG |
| | | | TCCTGTAGTCACTGTTTGTACTTGT |
| | | | GCATGGGGTTGCCAGTACCACAAAA |
| | | | GAGACATCTGTGATTGTTCTATTAC |
| | | | AGAGAGACTTTAACGCCATTGCCTG |
| | | | GCCATTGCCTGGTTACTTGTTTTAT |
| 232303_at | ZNF608 | −0.71185659 | ATGGCAGTAGCAAGCTTTTCTGTTG |
| | | | AATCTAGTATACCTTGCTTACCCAG |
| | | | TACCTTGCTTACCCAGGAGGATGGT |
| | | | GGAGGATGGTTGTTAGGTGGAAATT |
| | | | TAAATTCATAGGAACCAACTTTTGG |
| | | | TTTGGTAAGTAAGTAGTTCAGAGGC |
| | | | GTTCAGAGGCTACAAACTGTTGACT |
| | | | ATGTTTTCTTGCAGGATACCTTTTA |
| | | | TTACATGCAAGTTCAGATCACCTCT |
| | | | AAATCTGGGCCGGGAGTGAGCCACT |
| | | | GTAGCCTAGTGGTAGTGGGCACCTG |

TABLE 2
Patient and Tumor Characteristics of Patients with
Estrogen Receptor α positive breast cancers.

| Characteristic | Loi | Buffa | Wang |
|---|---|---|---|
| Sample size | 250 | 134 | 209 |
| Age, years | | | |
| Median (SD) | 63 (10) | 57 (10) | 54 (12) |
| Histologic | | | |
| Grade | | | |
| 1 | 47 | 30 | |
| 2 | 128 | 64 | |
| 3 | 40 | 27 | |
| Unknown | 35 | 13 | 209 |
| Tumor stage | | | |
| T1 | 108 | 55 | |
| T2 | 136 | 70 | |
| T3 | 6 | 9 | |
| Unknown | | | 209 |
| Lymph node | | | |
| status | | | |
| Negative | 110 | 78 | 209 |
| Positive | 132 | 56 | |
| Unknown | 8 | | |
| Adjuvant | Yes | Yes | No |
| tamoxifen | | | |
| Median follow- | 7 | 10 | 7 |
| up (years) | | | |

### EXAMPLES

### Example 1

### A shRNA Screen Identifies USP9X as a Tamoxifen Resistance Gene

### Materials and Methods

### Cell Lines and Culture Conditions

[0108] The human breast cancer cell lines ZR-75-1 (ATCC CRL-1500), MDA-MB-231 (ATCC HTB-26) and T47D (ATCC HTB133) were cultured in DMEM supplemented with 10% FCS, 2 mM glutamine, 100 μg/ml penicillin, 100 μg/ml streptomycin, and 1 nM estradiol at 37° C. in 5% CO2. In proliferation assays, estradiol was replaced by DMSO (vehicle), 1 μM 4OHtamoxifen (hereinafter: tamoxifen) or 10-7 M fulvestrant. Phoenix cells (ATCC CRL-3214) were cultured at 37° C. in 5% CO2 in DMEM with 10% FCS, 2 mM glutamine, 100 μg/ml penicillin, and 100 μg/ml streptomycin.

### Transfection and Retroviral Infection

[0109] Phoenix cells were transfected using calcium phosphate method. Viral supernatant was cleared through a 0.45 μm filter. Target cells were infected with the viral supernatant in the presence of polybrene (8 μg/ml) and the infection was repeated once. For transient transfection of ZR-75-1 cells Lipofectamine 2000 (Invitrogen) was used, according to the manufacturers protocol.

NKI shRNA Library

[0110] The construction of the library was described previously (Berns et al., 2004. Nature 428: 431-7). Briefly, the NKI shRNA library was designed to target 7914 human genes, using three shRNA vectors for every targeted gene. The shRNAs are cloned into a retroviral vector (pRetroSUPER (pRS)) to enable infection of target cells.

### Colony Formation Assay

[0111] Cells were infected with retroviral supernatant and selected with puromycin (2.0 μg/ml). When the selection was completed 5×104 cells were seeded in 10 cm dishes and cultured in DMEM with 1 μM 4OH-tamoxifen for 4-6 weeks. When colonies appeared, cells were fixed in MeOH/HAc (3:1) and subsequently stained with 50% MeOH/10% HAc/0.1% Coomassie.

shRNA Screen and Recovery of shRNA Inserts

[0112] ZR-75-1 cells stably expressing the murine ecotropic receptor were infected with retroviral supernatants containing a selection of the NKI pRS-shRNA library (12,540 shRNA vectors targeting 4180 genes divided in 44 pools—each pool contains 285 distinct short hairpin RNA's against 95 genes) or pRS as control (Berns et al., 2004. Nature 428: 431-7). After puromycin selection (2 μg/ml) 2×105 cells of each pool and control were plated in 15 cm dishes and cultured in DMEM with 1 μM 4OHtamoxifen for 4-6 weeks. Individual colonies that grew out in the presence of tamoxifen were isolated and expanded. Genomic DNA was isolated using DNAzol (Life Technologies). PCR amplification of the shRNA inserts was performed with Expand Long Template PCR system (Roche) and the use of pRS-fw primer: 5′-CCCTTGAACCTCCTCGTTCGACC-3′ and pRS-rev primer: 5′-GAGACGTGCTACTTCCATTTGTC-3′. Products were digested with EcoRI/XhoI and recloned into pRS. Hairpins were sequenced with Big Dye Terminator (Perkin Elmer) using pRS-seq primer: 5′-GCTGACGTCATCAACCCGCT-3′.

### Constructs

[0113] For retroviral transduction of human breast cancer cells, ZR-75-1 cells and T47D cells were transfected with pBabeHygro-Ecotropic Receptor and selected with hygromycin (100 μg/ml) and subsequently infected with the supernatant of the Phoenix ecotrophic virus packaging cell line.

[0114] The short hairpin sequence targeting USP9X recovered from the NKI shRNA library was:

GAACAGGAGAAACGGGTAT

[0115] For the generation of additional shRNA vectors targeting USP9X the following 19-mer sequences cloned in pRetroSuper were used:

| | | |
|---|---|---|
| USP9X II | 1800-1818 | GGAAATGCTTAGCTGAGAA |
| USP9X III | 2725-2743 | CCATGGTAATCATTACAGT |
| USP9X IV | 3601-3619 | CGAACAGGTTTGCTGTGAA |
| USP9X V | 4483-4501 | CTACATGATTCCTTCCATT |
| USP9X VI | 5020-5038 | GGAACAGTATGTCAAAGGA |

### Results

[0116] To identify genes causally involved in tamoxifen resistance, a loss-of-function genetic screen was performed in ZR-75-1 luminal breast cancer cells. We first stably expressed the murine ecotropic receptor (Scholz and Beato, 1996. Nucleic Acids Res 24: 979-980) in these cells and subsequently infected them with retroviral supernatants containing a selection of the NM pRS-shRNA library (12,540 shRNA vectors targeting 4180 genes) or pRS as control (Berns et al., 2004. Nature 428: 431-7) (FIG. 1A). Library-infected cells and control cells were plated at low density and cultured in DMEM with 1 μM 4OH-tamoxifen for 4-6 weeks. Individual colonies that grew out in the presence of tamoxifen were isolated and shRNA inserts of the vectors were recovered by PCR. These shRNA inserts were subsequently re-cloned and identified through DNA sequence analysis. This approach resulted the identification of USP9X, as a candidate tamoxifen resistance gene. A colony formation assay in ZR-75-1 cells (FIG. 1B) was performed with the shRNA identified in the screen to confirm the rescue from tamoxifen induced proliferation arrest.

[0117] To investigate whether the escape from tamoxifen induced proliferation arrest was the result of an “on target effect of the shRNA”, 5 additional shRNAs targeting different regions of the USP9X gene were designed and tested for their ability to confer tamoxifen resistance. FIG. 1C shows that three of these shRNAs had an identical phenotype to the original shRNA vector as cells grew out in the presence of tamoxifen treatment. Importantly, only the vectors that suppressed USP9X mRNA (FIG. 1D) and protein levels (FIG. 1E) induced tamoxifen resistance. To ask whether the rescue from tamoxifen induced proliferation arrest is independent of cellular context, we also tested two USP9X shRNA vectors for their ability to confer tamoxifen resistance in a second luminal breast cancer cell line: T47D. FIG. 1F shows that knockdown of USP9X in T47D cells enabled cell proliferation in the presence of tamoxifen as well, suggesting that USP9X suppression leads to tamoxifen resistance independent of the cellular context.

[0118] Importantly, knockdown of USP9X did not rescue cells from a proliferation arrest induced by the estrogen receptor downregulator fulvestrant, illustrating that shUSP9X-effects on cell proliferation are ERα-dependent (data not shown). In line with these data, knockdown of USP9X in the ERα negative cell line MDA-MB-231 did not induce cell proliferation, even resulting in a growth disadvantage in these cells (not shown).

### Example 2

### Knockdown of USP9X Increases ERα Activity

### Material and Methods

### Luciferase Assay

[0119] Monoclonal cell lines stably expressing pRS-USP9X or pRS-GFP as control were plated in triplicate in 6 wells plates in regular DMEM. The next morning cells were washed with PBS and fresh DMEM+10% FCS without Pen/Strep was added followed by Lipofectamine (Invitrogen) transfection according to the manufactures protocol with 1.75 μg ERE-TATA luciferase reporter plasmid vector and 0.5 μg pRL-CMV Renilla luciferase (Promega) per well. Eight hours after transfection cells were washed with PBS and supplied with fresh fenol red free DMEM with 10% charcoal stripped serum or DMEM with 10% FCS. 24 hours after transfection medium was refreshed with ligands as indicated and 48 hours after transfection cells were lysed with passive lysis buffer and the luciferase reaction was performed conform the manufactures protocol (Dual Luciferase Reporter Assay System, Promega). The Renilla luciferase activity was used to correct for differences in transfection efficiency. The relative reporter activity in the absence of ligand was used as a reference and set at 1.

### QRT-PCR (Quantitative Real Time PCR)

[0120] Total RNA was isolated using TRIzol (Invitrogen) or using the Quick RNA MiniPrep kit (R1055 Zymo Research). From the total RNA, cDNA was generated using Superscript II (Invitrogen) with random hexamer primers (Invitrogen). cDNA was diluted and the QRT reaction was performed using SYBR green PCR master mix (Applied Biosystems). All QRT reactions were run in parallel for GAPDH to control for amount cDNA input. The QRT reaction was followed by a melting curve to confirm the formation of a single PCR product. The QRT reactions were run at an AB7500 Fast Real Time PCR system (Applied Biosystems). The following PCR primer sequences were used:

| | |
|---|---|
| GAPD-81FW | AAG GTG AAG GTC GGA GTC AA |
| GAPD-188RV | AAT GAA GGG GTC ATT GAT GG |
| ESR1-120FW | ATG ATC AAC TGG GCG AAG AG |
| ESR1-212RV | CAG GAT CTC TAG CCA GGC AC |
| PGR-101FW | GTC CTT ACC TGT GGG AGC TG |
| PGR-191REV | CGA TGC AGT CAT TTC TTC CA |
| TFF1-51FW | GGA GAA CAA GGT GAT CTG CG |
| TTF1-160REV | AAT TCT GTC TTT CAC GGG GG |

### Results

[0121] Next we examined whether the rescue from tamoxifen-induced proliferation arrest was the result of increased ERα signaling. Therefore, ZR-75-1 cell lines stably expressing pRSUSP9X or control pRS-GFP were created. First, we tested whether knockdown of USP9X increased ERα activity, as judged by the activity of a reporter construct having Estrogen Responsive Elements linked to luciferase (ERE-luciferase), under the conditions used in the shRNA screen. FIG. 2A shows that USP9X knockdown (USP9XKD) cells have increased ERα transcriptional activity, both when cultured in normal culture media and when cultured in the presence of 4OH-tamoxifen. To rule out a residual effect of estradiol seen when cultured in regular DMEM with 4OH-tamoxifen (as fetal calf serum contains small amounts of estradiol, and the phenol red dye in the culture media has been shown to have weak estrogenic activity), we performed luciferase assays after 24 hours of serum starvation of cells in phenol red-free DMEM supplemented with 10% charcoal stripped (and hence steroid-free) serum, followed by 24 hours of treatment with either estradiol, estradiol+4OH-tamoxifen or 4OHtamoxifen alone. FIG. 2B shows that under all these conditions ERα signaling is about 2.5 times higher in the USP9XKD cell line as compared to the control cell line. Knockdown of USP9X also resulted in increased mRNA levels (FIG. 2C) and protein levels (FIG. 2D) of the ERα target genes Progesterone Receptor (PR), Trefoil factor 1 (TFF1/PS2) and of ERα itself (Eeckhoute et al., 2007. Cancer Res 67: 6477-83).

### Example 3

### Physical Interactions Between USP9X and ERα

### Materials and Methods

### Immunoprecipitation and Immunoblotting

[0122] For immunoprecipitation cells were lysed in ELB containing 250 mM NaCl, 0.1% NP-40, 50 mM Hepes pH 7.3, and Complete protease inhibitor cocktail from Roche. Supernatants of the lysates were incubated with either anti-USP9X (clone 1C4; Abnova/Sigma Aldrich), or anti-ERα (D-12; Santa Cruz) coupled to protein A/G sepharose beads. Normal mouse serum coupled to protein A/G sepharose beads was used as control. For Western blotting antibodies were used detecting USP9X (clone 1C4; Abnova/Sigma Aldrich), ERα (clone 1D5; Dako), Progesterone Receptor (clone 1A6; Novocastra), and beta-actin (clone AC-74; Sigma Aldrich A 5316).

### Results

[0123] Given the functional interaction between USP9X and ERα, we next tested whether ERα and USP9X physically interact. We expressed human ERα in Phoenix cells. Cells were lysed in mild detergent and the lysate was immunoprecipitated with anti-USP9X antibody or anti-ERα antibody and Western blotting was performed. As shown in FIG. 3A, exogenously expressed human ERα forms a complex with endogenous USP9X. Importantly, FIG. 3B shows that in the ERα-positive ZR-75-1 cells endogenous ERα also co-immunoprecipitates with endogenous USP9X, demonstrating the existence of a physical complex of these proteins under physiological conditions, which was recently also shown by mass spectrometry by Stanisic et al. (Stanisic et al., 2009. J Biol Chem 284: 16135-45).

### Example 4

### USP9X Loss Selectively Enhances ERα/Chromatin Interactions Upon 4OH-Tamoxifen Treatment

### Materials and Methods

### Chromatin Immunoprecipitations

[0124] Chromatin Immunoprecipitations (ChIP) were performed as described before (Schmidt et al., 2009. Methods 48: 240-8). For each ChIP, 10 μg of antibody was used, and 100 μl of Protein A magnetic beads (Invitrogen). The antibody used was raised against ERα (SC-543; Santa Cruz).

### Next Gen Sequencing and Enrichment Analysis

[0125] ChIP DNA was amplified as described (Schmidt et al., 2009. Methods 48: 240-8). Sequences were generated by the Illumina Hiseq 2000 genome analyser (using 50 bp reads), and aligned to the Human Reference Genome (assembly hg19, February 2009). Enriched regions of the genome were identified by comparing the ChIP samples to mixed input using the MACS peak caller (Zhang et al., 2008. Genome Biol 9: R137) version 1.3.7.1.

### Motif Analysis, Heatmaps and Genomic Distributions of Binding Events

[0126] ChIP-seq data snapshots were generated using the Integrative Genome Viewer IGV 2.1 (www.broadinstitute.org/igv/). Motif analyses were performed through the Cistrome (cistrome.org), applying the SeqPos motif tool (He et al., 2010. Nat Genet 42: 343-7). The genomic distributions of binding sites were analysed using the cis-regulatory element annotation system (CEAS) (Ji et al., 2006. Nucleic Acids Res 34: W551-4). The genes closest to the binding site on both strands were analysed. If the binding region is within a gene, CEAS software indicates whether it is in a 5′UTR, a 3′UTR, a coding exon, or an intron. Promoter is defined as 3 kb upstream from RefSeq 5′ start. If a binding site is >3 kb away from the RefSeq transcription start site, it is considered distal intergenic.

### Statistical Analysis

[0127] Normalised mRNA expression data for three patient series were downloaded from GEO: GSE6532 (Loi et al., 2007. J Clin Oncol 25: 1239-46), GSE22219 (Buffa et al., 2011. Cancer Res 71: 5635-45), and GSE2034 (Wang et al., 2005. Lancet 365: 671-9). From these, two sets of ERα-positive, tamoxifen-treated patients (Loi, n=250; Buffa, n=134), and one set of ERα-positive untreated patients (Wang, n=209) were extracted, for which followup was available. Probes in the Buffa and Wang data were median-centered before further processing. The Loi data had already been median-centered. The 526 genes of the USP9X knockdown tamoxifen signature were mapped to the corresponding microarray platforms by selecting all probes for matching genes, and ignoring genes not present on the array. For the Loi data, this selected 949 probe sets represent 488 different genes. For the Buffa data, 363 probes were selected representing 295 genes and for the Wang data, 792 probe sets representing 391 genes were available. 254 of the signature genes were present on all three array platforms. Patients were stratified into two groups by applying a hierarchical complete linkage clustering using Pearson correlation distance, and dividing by the first split of the clustering. Significant differences in distant metastasis free survival time between these two groups were tested for using the log-rank test. Survival times longer than ten years were right-censored. The array platform used for the untreated Wang data provides a subset of the probes available for the treated Loi data (792 out of 949).

[0128] To verify that this difference does not affect the comparison between treated and untreated, the Loi samples were additionally clustered based on this subset only. This clustering was found still to stratify patients according to prognosis (log-rank p=1.3×10-5). The directionality of USP9X knockdown tamoxifen classification genes in the good and poor outcome patient groups is shown in Table 1.

### Results

### Knockdown of USP9X Give Rise to Both Tamoxifen Resistance and ERα-Responsive Gene Activation.

[0129] The effects of USP9X knockdown on ERα/chromatin interactions were tested for hormone-depleted (vehicle), estradiol and tamoxifen-conditions, using chromatin immunoprecipitation, followed by high-throughput sequencing (ChIP-seq). ZR-75-1 cell lines stably expressing pRS-USP9X or pRS-GFP (control) were plated in hormone depleted medium for 72 hours. Typically, ERα ChIP-seq experiments are performed after a treatment for 45 minutes with ligand (Carroll et al., 2005. Cell 122: 33-43; Hurtado et al., 2011. Nat Genet 43: 27-33). Since USP9X suppression causes long-term resistance to tamoxifen, we were interested in ERα biology after prolonged ligand treatment and the effects of USP9X knockdown thereon. Therefore, the cells were treated with vehicle, estradiol or 4OH-tamoxifen for 48 hours before the ChIP assay.

[0130] In control cells, estradiol treatment greatly enhanced ERα/chromatin interactions, while this was far less pronounced when treating the cells with 4OH-tamoxifen. USP9X knockdown had no effect on ERα/chromatin interactions in vehicle and estradiol treated cells, but significantly increased chromatin binding intensity upon 4OH-tamoxifen treatment as exemplified in FIG. 4A. The stabilization of ERα/chromatin interactions in the presence of 4OH-tamoxifen could be generalized throughout the genome, as depicted in a heat map visualization (FIG. 4B) and expressed in a quantified format in a 2D graph (FIG. 4C). This increased intensity of ERα/chromatin interactions in 4OH-tamoxifen-treated cells also translated into a significant increase in the number of chromatin binding events, representing a subset of the estradiol-induced binding patterns under the same conditions (FIG. 4D). Comparing control with USP9XKD under the same ligand conditions showed a relative selectivity for gained sites, both for estradiol and 4OH-tamoxifen conditions, while this was not the case for vehicle-treated cells (FIG. 4E).

[0131] ERα rarely binds promoters (5%), and the vast majority of ERα binding events are found at distal enhancers (Carroll et al., 2005. Cell 122: 33-43.38). We could confirm these data for estradiol and 4OH-tamoxifen conditions, both in control and USP9XKD cells (FIG. 4F). Vehicle-treated cells showed enrichment of ERα binding to promoters as was found before (Zwart et al., 2011. EMBO J 30: 4764-76), which was not influenced by knockdown of USP9X. The gained ERα binding events for USP9XKD cells under tamoxifen conditions showed identical distributions as found for estradiol and tamoxifen-treated control cells. De novo DNA motif enrichment analyses provided ESR motifs, and ERα binding sites that were selectively induced by USP9X knockdown in the presence of 4OH-tamoxifen, and were practically identical to those shared between control cells and USP9XKD cells (FIG. 4G).

[0132] Collectively, these data show that USP9X knockdown induces ERα binding events, selectively in the presence of 4OH-tamoxifen, that represent a subset of estradiol-induced sites and do not deviate in normal ERα behaviour with respect to genomic distributions and DNA motif enrichment.

### Example 5

### RNA Expression Analysis

[0133] Transcriptome sequencing analysis of the cell line ZR-75-1 with stable USP9X knockdown or a control vector were performed using RNA-Seq. The reads (14-30 million 50 bp single-end) were mapped to the human reference genome (hg19) using TopHat (Trapnell et al., 2009. Bioinformatics 25: 1105-1127), which allows to span exon-exon splice junctions. TopHat was supplied with a known set of gene models (Ensembl version 64). The open-source tool HTSeq-Count was used to obtain gene expressions. This tool generates a list of the total number of uniquely mapped sequencing reads for each gene that is present in the provided Gene Transfer Format (GTF) file. In order to identify differentially expressed genes, the random sampling model in the R package DEGseq (Wang et al., 2010. Bioinformatics 26: 136-8.28) was used. We have taken a p-value of 0.05 as a cut-off to determine whether a gene is significantly differentially expressed. The input of this method is the absolute number of reads for a gene, which is the output of HTSeq-count. Genes with no expression across both samples in the comparison were discarded from the dataset. The expression levels of the remaining genes were added with 1 in order to avoid negative values after log 2 transformation during the normalization step within this method.

### Results

### USP9X and Global Gene Expression Analyses

[0134] Our ChIP-seq analyses indicate that USP9X knockdown selectively increases ERα/chromatin interactions in the presence of tamoxifen that are normally found for estradiol conditions. We therefore asked whether USP9X knockdown in tamoxifen-treated cells would also give rise to a typical estradiol-responsive gene set. To address this, we performed RNAseq on ZR-75-1 cells stably expressing pRS-USP9X or pRS-GFP (control) that—after hormone depletion for 72 hours—were treated for 48 hours with vehicle, estradiol or 4OHtamoxifen. Comparing gene expression in both cell lines, we found that estradiol-treatment led to an altered expression of 8794 genes as compared to vehicle, while after 4OHtamoxifen treatment 1906 genes were differentially expressed. All altered transcripts under 4OH-tamoxifen conditions represented a subset of the estradiol-responsive genes (FIG. 5A, left panel). 4OH-tamoxifen treatment in USP9XKD cells as compared to 4OH-tamoxifen treated control cells resulted in an altered expression of 6210 transcripts, 4336 of which were shared with estradiol-induction in control cells (FIG. 5A, right panel). The differentially expressed genes in 4OH-tamoxifen-treated USP9XKD cells specifically showed an increase in number (FIG. 5B) and intensity (FIG. 5C) of proximal ERα binding events.

[0135] The majority of genes that are differentially expressed upon tamoxifen treatment in the USP9XKD cells were shared with estradiol induction. ERα-positive breast tumors are hallmarked by a selective and specific enrichment of so-called ‘luminal-signature genes’ (Perou et al., 2000. Nature 406: 747-52). Therefore, the USP9X knockdown tamoxifen gene set, which was shared with the estradiol responsive gene list and which also showed enhanced proximal ERα binding events, (526 out of 4336 genes, see FIG. 5B right two columns), was tested for enrichment of ‘luminal’ over ‘basal’ genes, using the genes as defined by Perou et al (Perou et al., 2000. Nature 406: 747-52). A clear enrichment of luminal genes was found relative to basal signature genes, consistent with the notion that USP9X knockdown enhances ERα signaling (FIG. 5D).

### Example 6

### A USP9X Knockdown Tamoxifen Gene Expression Signature Identifies Breast Cancer Patients with a Poor Outcome after Adjuvant Tamoxifen Treatment

[0136] The RNA-seq analyses revealed that the majority of genes that were differentially expressed upon tamoxifen treatment in the USP9XKD cells were a subgroup of estradiol induced genes (4336 out of 8794). Furthermore, integrating these results with the ChIP-seq data showed that a subgroup of these genes (526 out of 4336) is enriched for proximal ERα binding events. This particular subgroup of genes is expected to represent a direct ERα target gene signature in contrast to the (potentially indirectly regulated) genes that were not enriched for ERα binding. Since these directly ERα regulated genes would also be the genes that are directly affected under tamoxifen resistant conditions, differential expression of these particular genes in breast tumors could hallmark tamoxifen unresponsiveness.

[0137] To test this hypothesis, we investigated whether these genes were differentially expressed in a publically available data set of 250 patients with primary ERα positive breast cancer with known outcome (Loi et al., 2007. J Clin Oncol 25: 1239-46). All these patients received adjuvant tamoxifen. For relevant clinicopathological parameters, see Table 2. As visualised in a heatmap (FIG. 5E), unsupervised clustering on the basis of our gene signature resulted in the identification of two distinct subgroups of patients. These subgroups of patients were subsequently analysed for differential distant metastasis-free survival after adjuvant tamoxifen treatment. FIG. 5F left panel shows that this gene set identifies a subgroup of breast cancer patients with a poor outcome after tamoxifen treatment (p=9.4×10-5). This data could be validated using a second cohort of ERα positive breast cancer patients (n=134) who received adjuvant tamoxifen treatment (Buffa et al., 2011. Cancer Res 71: 5635-45). FIG. 5F, middle panel, shows that our classifier successfully identified tamoxifen-treated breast cancer patients with a poor outcome (p=6.5×10-4). We then tested our signature on a cohort of primary ERα positive breast cancer patients (n=209) (Wang et al., 2005, Lancet 365: 671-9) who did not receive any adjuvant endocrine treatment. Importantly, in these patients, the USP9X knockdown tamoxifen gene expression signature did not correlate with outcome, indicating that the gene signature is not a prognostic signature (FIG. 5F right panel).

### Example 7

### Material and Methods

### Gene Expression Data

[0138] Gene expression data from five publically available studies were used for developing or validating the USP9X signature. All cohorts consist of ERα-positive, tamoxifen-treated breast cancer patients. Cohort 1 (GSE6532; Loi et al., 2007. J Clin Oncol 25: 1239-46) was used in our unsupervised clustering analysis to identify the two USP9X clusters. Furthermore, it was also used in the supervised gene selection procedures described below, and will henceforth be referred to as the training data. Data from four other studies were exclusively used for validating the trained classifier: cohort 2 (GSE12093; Zhang et al., 2009. Breast Cancer Res Treat 116: 303-9), cohort 3 (GSE26971; Filipits et al., 2011. Clin Cancer Res 17:6012-20), cohort 4 (GSE9195; Loi et al., 2008. BMC Genomics 9:239), and cohort 5 (GSE17705; Symmans et al., 2010. J Clin Oncol 28:4111-9). The complete data set for cohort 5 includes 102 samples that overlap with cohort 1. For the validation, we removed the overlapping samples from cohort 5.

### Training the USP9X Classifier

[0139] The training data were used for supervised training of a classifier that assigns new tumor samples to one of the two USP9X clusters. The two clusters identified by the unsupervised clustering of the training data were used as the gold standard. For training the classifier, we used the nearest shrunken centroid (NSC) method (Tibshirani et al., 2002. Proc Natl Acad Sci USA 99:6567-72). In short, class centroids are estimated based on the within-class means of the signature genes. Then, a shrinkage parameter is tuned to shrink the within-class means towards the overall means per gene. Genes for which the within-class mean is fully shrunk to the overall mean do not discriminate between the two classes, and are therefore not used for classification. Because of this, tuning the shrinkage parameter yields an optimised subset of genes to use for classification. We tuned the NSC shrinkage parameter to maximise the cross-validated area under the ROC curve (AUC), using a 10-fold cross validation (CV) procedure. We tested this gene selection procedure on the training set in a nested cross validation set-up. Within each outer-CV iteration, the shrinkage parameter was tuned on 90% of the training samples using an internal CV as described above. Subsequently, the selected shrinkage parameter was used to classify the remaining 10% of the training samples. The cross-validated AUC of the outer-CV was 0.95, which confirms the validity of the gene selection procedure. Subsequently, we trained the final classifier by estimating class centroids and tuning the shrinkage parameter on the entire training set. The best cross-validated AUC performance was obtained by selecting 155.

### Identification of a Minimal Gene Signature

[0140] We looked for even smaller sets of signature genes in a more stringent gene selection procedure. For this, we performed a similar CV procedure as above, but used L1-regularised logistic regression instead of NSC. This choice was made because L1 regularisation generally leads to sparser gene selections. We repeated the CV gene selection procedure 100,000 times, with randomly sampled fold assignments, and kept those genes that were selected in at least 99% of the iterations. Using this procedure, we selected 9 genes. Next, we tested for each subset of these 9 genes, whether clustering on the subset yields two clusters that show a significant difference in survival on the training set. A selection of 5 genes: MYBL2, IDH3A, CHSY1, BUB1B, CAPN2 gave rise to the largest survival differences among all subsets. However, most smaller subsets of these 5 do still separate good from poor survival to a large extent.

### Results

### Validation of the USP9X Classifier in Independent Patient Cohorts

[0141] The NSC classifier was trained on the training data, selecting 155 genes in the process. We subsequently used it to classify tumors from cohorts 2, 3, 4, and 5. None of these cohorts was used in training the classifier or selecting the genes. Survival curves for the classifications are shown in FIG. 6. The curves for cohort 1 are based on cross-validated predictions, i.e. the classifier used for classifying a tumor was not trained on data including that same tumor. On all cohorts but cohort 5, the two identified groups show a significant difference in survival. The results for cohort 5 show a strong trend towards significance but are hampered by the small number of events in this cohort.

### Validation of the Minimal Gene Signature in Independent Patient Cohorts

[0142] We also validated the minimal, 5 gene signature on the validation cohorts. A nearest centroid classifier for this signature was trained on the training data and subsequently used to classify the tumors in cohorts 2-5. The resulting survival curves are shown in FIG. 7. The performance of the minimal gene signature is mostly comparable to that of the 155-gene NSC classifier, although it is slightly better for some of the validation cohorts, and slightly worse for others.

### Example 8

### Materials and Methods

### Establishing the Minimum Required Number of Genes

[0143] To establish the minimum signature size that still allows successful stratification of patients, we randomly sampled smaller subsets of genes, and evaluated their classification performance. For each gene set size between 2 and 50, we drew 200 random subsets from the 155 genes selected for the USP9X classifier. Nearest centroid classifiers based on the random subsets were evaluated in a 10-fold cross validation set-up. Next, the mean of the cross-validated areas under the ROC curve (AUC) were estimated per subset size.

### Results

[0144] Mean AUCs per subset size are shown in FIG. 8 for two different evaluation criteria. One criterion is how well the random subsets are able to recover the USP9X classes defined by clustering on the larger signature. For this criterion, a mean AUC of 0.77 is achieved with random subsets of 5 genes. As the subset sizes grow towards 50, the mean AUC converges towards 0.95. The second criterion is how well the predicted classes separate poor survival from good survival. The figure shows the area under the time-dependent ROC curve evaluated at 5 years. With random subsets of 5 genes, an average AUC of 0.67 is achieved.

The application's sequence listing, which the Patent Office published only in electronic form, follows.

SEQUENCE LISTING (4072 sequences)

SEQ ID NO: 1 - DNA, 25 bp, Artificial Sequence
  probe
ccaactacagctgcgtctacgtgga

SEQ ID NO: 2 - DNA, 25 bp, Artificial Sequence
  probe
gctgcgtctacgtggacctaaagcc

SEQ ID NO: 3 - DNA, 25 bp, Artificial Sequence
  Probe
tacgtggacctaaagccacctttcg

SEQ ID NO: 4 - DNA, 25 bp, Artificial Sequence
  Probe
gctgcgcgagggcgagacgaaggcc

SEQ ID NO: 5 - DNA, 25 bp, Artificial Sequence
  Probe
cgaaggccgtgaagacggtccgcac

SEQ ID NO: 6 - DNA, 25 bp, Artificial Sequence
  Probe
cgaacctcgagctgatcttcgtggg

SEQ ID NO: 7 - DNA, 25 bp, Artificial Sequence
  Probe
cacgccggcaactacaggtgccgct

SEQ ID NO: 8 - DNA, 25 bp, Artificial Sequence
  Probe
cacaccttcgaatcggagctcagcg

SEQ ID NO: 9 - DNA, 25 bp, Artificial Sequence
  Probe
ctgtggagctcctggtggcagaaag

SEQ ID NO: 10 - DNA, 25 bp, Artificial Sequence
  Probe
gtgctgttggtgtcctcagaagtgc

SEQ ID NO: 11 - DNA, 25 bp, Artificial Sequence
  Probe
aagtgccggggattctggactggct

SEQ ID NO: 12 - DNA, 25 bp, Artificial Sequence
  Probe
ggatgacccagcagacgtgatgacc

SEQ ID NO: 13 - DNA, 25 bp, Artificial Sequence
  Probe
aggagttcaggcctaatgctcccta

SEQ ID NO: 14 - DNA, 25 bp, Artificial Sequence
  Probe
ctaccggatcttcaacacgtggctg

SEQ ID NO: 15 - DNA, 25 bp, Artificial Sequence
  Probe
ccgtccaagaacctgttgctggctg

SEQ ID NO: 16 - DNA, 25 bp, Artificial Sequence
  Probe
gctggctgaggtcatcaacatcatc

SEQ ID NO: 17 - DNA, 25 bp, Artificial Sequence
  Probe
tgagaggacgaggcaccttttgctc

SEQ ID NO: 18 - DNA, 25 bp, Artificial Sequence
  Probe
tccttcgatactcccgatgattcca

SEQ ID NO: 19 - DNA, 25 bp, Artificial Sequence
  Probe
tgacaaatccattcgtttccgtccc

SEQ ID NO: 20 - DNA, 25 bp, Artificial Sequence
  Probe
cgtcccacgctggtgttcagggatc

SEQ ID NO: 21 - DNA, 25 bp, Artificial Sequence
  Probe
aagaagccatttccactacagtgag

SEQ ID NO: 22 - DNA, 25 bp, Artificial Sequence
  Probe
acagtgagaaagcccggatcccaac

SEQ ID NO: 23 - DNA, 25 bp, Artificial Sequence
  Probe
taatgtatctacatacctacaccta

SEQ ID NO: 24 - DNA, 25 bp, Artificial Sequence
  Probe
atctacatacctacacctatctata

SEQ ID NO: 25 - DNA, 25 bp, Artificial Sequence
  Probe
acacctatctatatataagctcatg

SEQ ID NO: 26 - DNA, 25 bp, Artificial Sequence
  Probe
gaaaaccatagctaagtagcatcgc

SEQ ID NO: 27 - DNA, 25 bp, Artificial Sequence
  Probe
gtagcatcgcagacttaagcgtaca

SEQ ID NO: 28 - DNA, 25 bp, Artificial Sequence
  Probe
aagcgtacaaagtgatcttgttcac

SEQ ID NO: 29 - DNA, 25 bp, Artificial Sequence
  Probe
tcttgttcacaagtaatctgttgac

SEQ ID NO: 30 - DNA, 25 bp, Artificial Sequence
  Probe
atctgttgacagtgccaataaatga

SEQ ID NO: 31 - DNA, 25 bp, Artificial Sequence
  Probe
catgtcacaatgtaacggatgacca

SEQ ID NO: 32 - DNA, 25 bp, Artificial Sequence
  Probe
cggatgaccatatgcacaattccat

SEQ ID NO: 33 - DNA, 25 bp, Artificial Sequence
  Probe
cctgtgttagtcagtattcttaaat

SEQ ID NO: 34 - DNA, 25 bp, Artificial Sequence
  Probe
agaattctcagcagagctcaagatt

SEQ ID NO: 35 - DNA, 25 bp, Artificial Sequence
  Probe
gattgtagaaactcagcagaagctg

SEQ ID NO: 36 - DNA, 25 bp, Artificial Sequence
  Probe
gctggtaaaaacatggggagcccgg

SEQ ID NO: 37 - DNA, 25 bp, Artificial Sequence
  Probe
cttccgtggccgacagtctggaaat

SEQ ID NO: 38 - DNA, 25 bp, Artificial Sequence
  Probe
tggccgacagtctggaaatgaatcc

SEQ ID NO: 39 - DNA, 25 bp, Artificial Sequence
  Probe
gaatccatcatacattagtgccata

SEQ ID NO: 40 - DNA, 25 bp, Artificial Sequence
  Probe
gtgccatagagtttagtaaccgtcc

SEQ ID NO: 41 - DNA, 25 bp, Artificial Sequence
  Probe
tagtaaccgtccagcaagtgtcatc

SEQ ID NO: 42 - DNA, 25 bp, Artificial Sequence
  Probe
aaccgtccagcaagtgtcatcactt

SEQ ID NO: 43 - DNA, 25 bp, Artificial Sequence
  Probe
aacaaggtccagtaatagcaagtct

SEQ ID NO: 44 - DNA, 25 bp, Artificial Sequence
  Probe
gtccagtaatagcaagtcttagtac

SEQ ID NO: 45 - DNA, 25 bp, Artificial Sequence
  Probe
aggaaattcacccgaggtcgcaggg

SEQ ID NO: 46 - DNA, 25 bp, Artificial Sequence
  Probe
ggccttgagtactcattttggtgct

SEQ ID NO: 47 - DNA, 25 bp, Artificial Sequence
  Probe
attttggtgctgattacctctctgc

SEQ ID NO: 48 - DNA, 25 bp, Artificial Sequence
  Probe
taaattggtagtttcctgctctttt

SEQ ID NO: 49 - DNA, 25 bp, Artificial Sequence
  Probe
tttcctgctctttttgtgtaatctt

SEQ ID NO: 50 - DNA, 25 bp, Artificial Sequence
  Probe
taatgtgaagcctctgggggctgcc

SEQ ID NO: 51 - DNA, 25 bp, Artificial Sequence
  Probe
tgccctcgtgcactgatggttgtgt

SEQ ID NO: 52 - DNA, 25 bp, Artificial Sequence
  Probe
ggcagtgcgattcccttttagctgc

SEQ ID NO: 53 - DNA, 25 bp, Artificial Sequence
  Probe
ttagctgctgcatggggggaactca

SEQ ID NO: 54 - DNA, 25 bp, Artificial Sequence
  Probe
ttccatggggtagacccctcaaccg

SEQ ID NO: 55 - DNA, 25 bp, Artificial Sequence
  Probe
ttgacttggtttcgtttggtgctac

SEQ ID NO: 56 - DNA, 25 bp, Artificial Sequence
  Probe
aaaacctcctgggactgttgcaagg

SEQ ID NO: 57 - DNA, 25 bp, Artificial Sequence
  Probe
gggattgagggattgctgagctgga

SEQ ID NO: 58 - DNA, 25 bp, Artificial Sequence
  Probe
ttctcagtggggtggcacggagcgg

SEQ ID NO: 59 - DNA, 25 bp, Artificial Sequence
  Probe
ggcaggtggggctgtggttatgcga

SEQ ID NO: 60 - DNA, 25 bp, Artificial Sequence
  Probe
ggttatgcgatagggtctcccttcc

SEQ ID NO: 61 - DNA, 25 bp, Artificial Sequence
  Probe
tgtaactctttatcctcatggtgcc

SEQ ID NO: 62 - DNA, 25 bp, Artificial Sequence
  Probe
tgcccactacgagtcatactcttcc

SEQ ID NO: 63 - DNA, 25 bp, Artificial Sequence
  Probe
gccaaagcagaatgcagggtttcct

SEQ ID NO: 64 - DNA, 25 bp, Artificial Sequence
  Probe
gcgggggtgcttgagaaacctacat

SEQ ID NO: 65 - DNA, 25 bp, Artificial Sequence
  Probe
tatcaacctacaactttagtcggga

SEQ ID NO: 66 - DNA, 25 bp, Artificial Sequence
  Probe
caggggtggacctgagtttcgtctc

SEQ ID NO: 67 - DNA, 25 bp, Artificial Sequence
  Probe
aatgcaggtgtcctgagcaccacac

SEQ ID NO: 68 - DNA, 25 bp, Artificial Sequence
  Probe
gtgggggaggcgcacagtgtgagcc

SEQ ID NO: 69 - DNA, 25 bp, Artificial Sequence
  Probe
ccacgtcgtggggtaacatctgtta

SEQ ID NO: 70 - DNA, 25 bp, Artificial Sequence
  Probe
gaactcttggttcgatacctggagc

SEQ ID NO: 71 - DNA, 25 bp, Artificial Sequence
  Probe
ggtgtgatgaagtcacccctttctg

SEQ ID NO: 72 - DNA, 25 bp, Artificial Sequence
  Probe
cctttctgtcccactacatctggga

SEQ ID NO: 73 - DNA, 25 bp, Artificial Sequence
  Probe
tacatctgggactgactttccgagc

SEQ ID NO: 74 - DNA, 25 bp, Artificial Sequence
  Probe
cagtccaaagccggcttgatttccg

SEQ ID NO: 75 - DNA, 25 bp, Artificial Sequence
  Probe
ttgatttccgtgaactctggtgctc

SEQ ID NO: 76 - DNA, 25 bp, Artificial Sequence
  Probe
tgctcctgcatctcatgagtgtgcc

SEQ ID NO: 77 - DNA, 25 bp, Artificial Sequence
  Probe
gcctgtgggtttggtccttgaacaa

SEQ ID NO: 78 - DNA, 25 bp, Artificial Sequence
  Probe
gagaggctagcagaggtcaacacca

SEQ ID NO: 79 - DNA, 25 bp, Artificial Sequence
  Probe
agagcagatctttgttcaccactct

SEQ ID NO: 80 - DNA, 25 bp, Artificial Sequence
  Probe
cagtcatggagccaccttgtgtggg

SEQ ID NO: 81 - DNA, 25 bp, Artificial Sequence
  Probe
gaaaacttagtgatctctacctcaa

SEQ ID NO: 82 - DNA, 25 bp, Artificial Sequence
  Probe
tacctcaaatccacgggcttcaaat

SEQ ID NO: 83 - DNA, 25 bp, Artificial Sequence
  Probe
gaactacttgagcaagatgcagcag

SEQ ID NO: 84 - DNA, 25 bp, Artificial Sequence
  Probe
actagagaactcaaagaagctgctg

SEQ ID NO: 85 - DNA, 25 bp, Artificial Sequence
  Probe
gaatctggatcaatagcttcccctc

SEQ ID NO: 86 - DNA, 25 bp, Artificial Sequence
  Probe
ttcccctctagggtctactgatgag

SEQ ID NO: 87 - DNA, 25 bp, Artificial Sequence
  Probe
gggtctactgatgagtcaaatctaa

SEQ ID NO: 88 - DNA, 25 bp, Artificial Sequence
  Probe
tttattactgggctgtttatgtgac

SEQ ID NO: 89 - DNA, 25 bp, Artificial Sequence
  Probe
actttaagatcatttaccgccgcta

SEQ ID NO: 90 - DNA, 25 bp, Artificial Sequence
  Probe
acaaactggcttacctggagggcat

SEQ ID NO: 91 - DNA, 25 bp, Artificial Sequence
  Probe
ggagggcattcacaacttcgtggag

SEQ ID NO: 92 - DNA, 25 bp, Artificial Sequence
  Probe
tggacctggtgttcaacttctacaa

SEQ ID NO: 93 - DNA, 25 bp, Artificial Sequence
  Probe
ggtcgtggacgagatgttcctggct

SEQ ID NO: 94 - DNA, 25 bp, Artificial Sequence
  Probe
gaaatccgagagaccagccagacga

SEQ ID NO: 95 - DNA, 25 bp, Artificial Sequence
  Probe
aaacagctgctgatgctacagtccc

SEQ ID NO: 96 - DNA, 25 bp, Artificial Sequence
  Probe
tccttccctcaactgcctaggagga

SEQ ID NO: 97 - DNA, 25 bp, Artificial Sequence
  Probe
gaagggacccagctgggtctgggcc

SEQ ID NO: 98 - DNA, 25 bp, Artificial Sequence
  Probe
caagggaggagacttcaccccactt

SEQ ID NO: 99 - DNA, 25 bp, Artificial Sequence
  Probe
gccgttgtcgtgtgattccataagc

SEQ ID NO: 100 - DNA, 25 bp, Artificial Sequence
  Probe
atccagaaccgggcaggcaagacgc

SEQ ID NO: 101 - DNA, 25 bp, Artificial Sequence
  Probe
gcgcctggccaagtggtacatgcag

SEQ ID NO: 102 - DNA, 25 bp, Artificial Sequence
  Probe
gccaagtggtacatgcagtttgatg

SEQ ID NO: 103 - DNA, 25 bp, Artificial Sequence
  Probe
gatcgaggaggtgcatgccgtggtc

SEQ ID NO: 104 - DNA, 25 bp, Artificial Sequence
  Probe
gacgccaaacacaccaactttgtgg

SEQ ID NO: 105 - DNA, 25 bp, Artificial Sequence
  Probe
aaacgaatatttccacaatgtctgt

SEQ ID NO: 106 - DNA, 25 bp, Artificial Sequence
  Probe
caatgtctgtgaactggacctggtg

SEQ ID NO: 107 - DNA, 25 bp, Artificial Sequence
  Probe
gacctggtgttcaacttctacaagg

SEQ ID NO: 108 - DNA, 25 bp, Artificial Sequence
  Probe
tctacaaggtttacacggtcgtgga

SEQ ID NO: 109 - DNA, 25 bp, Artificial Sequence
  Probe
ctgatgctacagtccctggagtgag

SEQ ID NO: 110 - DNA, 25 bp, Artificial Sequence
  Probe
gtccctggagtgagggcaggcgagc

SEQ ID NO: 111 - DNA, 25 bp, Artificial Sequence
  Probe
actttaagatcatttaccgccgcta

SEQ ID NO: 112 - DNA, 25 bp, Artificial Sequence
  Probe
atgacaacaacctggcttacctgga

SEQ ID NO: 113 - DNA, 25 bp, Artificial Sequence
  Probe
gaggccattcacaacttcgtggagg

SEQ ID NO: 114 - DNA, 25 bp, Artificial Sequence
  Probe
tggacctggtgttcaacttctacaa

SEQ ID NO: 115 - DNA, 25 bp, Artificial Sequence
  Probe
ggtcgtggacgagatgttcctggct

SEQ ID NO: 116 - DNA, 25 bp, Artificial Sequence
  Probe
gaaatccgagagaccagccagacga

SEQ ID NO: 117 - DNA, 25 bp, Artificial Sequence
  Probe
aaacagctgctgatgctacagtccc

SEQ ID NO: 118 - DNA, 25 bp, Artificial Sequence
  Probe
tggagtgagggcaggcgagccccac

SEQ ID NO: 119 - DNA, 25 bp, Artificial Sequence
  Probe
acaagggaggagactgcaccccact

SEQ ID NO: 120 - DNA, 25 bp, Artificial Sequence
  Probe
gccgttgtcgtgtgatgccataagc

SEQ ID NO: 121 - DNA, 25 bp, Artificial Sequence
  Probe
ctgtgcgtggagtccccaataaacc

SEQ ID NO: 122 - DNA, 25 bp, Artificial Sequence
  Probe
tgctgcgacccagattcttctgcag

SEQ ID NO: 123 - DNA, 25 bp, Artificial Sequence
  Probe
aggatgtgtctgtctttgtcacggt

SEQ ID NO: 124 - DNA, 25 bp, Artificial Sequence
  Probe
gggtgacatcataggagcagctcgc

SEQ ID NO: 125 - DNA, 25 bp, Artificial Sequence
  Probe
cagctcgctggccagaaggggatgg

SEQ ID NO: 126 - DNA, 25 bp, Artificial Sequence
  Probe
cacacaaaacttcacagcaggccag

SEQ ID NO: 127 - DNA, 25 bp, Artificial Sequence
  Probe
agcaggccagctgcagtgacttgtc

SEQ ID NO: 128 - DNA, 25 bp, Artificial Sequence
  Probe
tagggtgcggtggccaggagggccc

SEQ ID NO: 129 - DNA, 25 bp, Artificial Sequence
  Probe
tcgctgctttcccgagggcagcgca

SEQ ID NO: 130 - DNA, 25 bp, Artificial Sequence
  Probe
gcagggatccggggaagctgcggca

SEQ ID NO: 131 - DNA, 25 bp, Artificial Sequence
  Probe
cggcttcgtggctctgaggtgtaac

SEQ ID NO: 132 - DNA, 25 bp, Artificial Sequence
  Probe
cggaggacatcgtctgtgtccaggt

SEQ ID NO: 133 - DNA, 25 bp, Artificial Sequence
  Probe
gtgttagtagtctggctgtgtgccc

SEQ ID NO: 134 - DNA, 25 bp, Artificial Sequence
  Probe
ctgtgtgcccaaaattctgtttcgc

SEQ ID NO: 135 - DNA, 25 bp, Artificial Sequence
  Probe
gtgcccaaaattctgtttcgcagca

SEQ ID NO: 136 - DNA, 25 bp, Artificial Sequence
  Probe
gtttcgcagcaaaagtgaagacctg

SEQ ID NO: 137 - DNA, 25 bp, Artificial Sequence
  Probe
tgggttttttgaggctccaacctga

SEQ ID NO: 138 - DNA, 25 bp, Artificial Sequence
  Probe
ggctccaacctgattagtgcatggt

SEQ ID NO: 139 - DNA, 25 bp, Artificial Sequence
  Probe
caatgaaggctgaggcatctctgac

SEQ ID NO: 140 - DNA, 25 bp, Artificial Sequence
  Probe
ggcatctctgactgaggtgtttttg

SEQ ID NO: 141 - DNA, 25 bp, Artificial Sequence
  Probe
gtacttgtctcaatgggaatggtgt

SEQ ID NO: 142 - DNA, 25 bp, Artificial Sequence
  Probe
aaaaggccttatgtgatctgtatca

SEQ ID NO: 143 - DNA, 25 bp, Artificial Sequence
  Probe
gaaaatttggaatagtgctgctgcc

SEQ ID NO: 144 - DNA, 25 bp, Artificial Sequence
  Probe
gccacggctggagagaccgagaccc

SEQ ID NO: 145 - DNA, 25 bp, Artificial Sequence
  Probe
gagacccggcgcaagagagcgcagc

SEQ ID NO: 146 - DNA, 25 bp, Artificial Sequence
  Probe
gagagcgcagccttagtaggagagg

SEQ ID NO: 147 - DNA, 25 bp, Artificial Sequence
  Probe
gtaggagaggaacgcgagacgcggc

SEQ ID NO: 148 - DNA, 25 bp, Artificial Sequence
  Probe
gagacgcggcagagcgcgttcagca

SEQ ID NO: 149 - DNA, 25 bp, Artificial Sequence
  Probe
gcgcgttcagcactgacttttgctg

SEQ ID NO: 150 - DNA, 25 bp, Artificial Sequence
  Probe
aaacaagaaggcgccagcggcagcc

SEQ ID NO: 151 - DNA, 25 bp, Artificial Sequence
  Probe
gaagccaacccgcgaagggaggagg

SEQ ID NO: 152 - DNA, 25 bp, Artificial Sequence
  Probe
tttttttgctcccactctaagaagt

SEQ ID NO: 153 - DNA, 25 bp, Artificial Sequence
  Probe
tcccactctaagaagtctcccgggg

SEQ ID NO: 154 - DNA, 25 bp, Artificial Sequence
  Probe
gtctcccggggattttgtatatatt

SEQ ID NO: 155 - DNA, 25 bp, Artificial Sequence
  Probe
ggacgagcatgacgcggtgagcgcc

SEQ ID NO: 156 - DNA, 25 bp, Artificial Sequence
  Probe
actactccaacgacttgaactccat

SEQ ID NO: 157 - DNA, 25 bp, Artificial Sequence
  Probe
tcgtcggacgagggctcttacgacc

SEQ ID NO: 158 - DNA, 25 bp, Artificial Sequence
  Probe
ttctcgacttcaccaactggttctg

SEQ ID NO: 159 - DNA, 25 bp, Artificial Sequence
  Probe
gccctggtgcgaatggactttggaa

SEQ ID NO: 160 - DNA, 25 bp, Artificial Sequence
  Probe
cagggtgatcgcacaacctgcatct

SEQ ID NO: 161 - DNA, 25 bp, Artificial Sequence
  Probe
acctgcatctttagtgctttcttgt

SEQ ID NO: 162 - DNA, 25 bp, Artificial Sequence
  Probe
ttcgcccgaactgatgcgctgcaaa

SEQ ID NO: 163 - DNA, 25 bp, Artificial Sequence
  Probe
caacttcagcggctttggctacagc

SEQ ID NO: 164 - DNA, 25 bp, Artificial Sequence
  Probe
agcgcaaccgcgtcaagttggtcaa

SEQ ID NO: 165 - DNA, 25 bp, Artificial Sequence
  Probe
caagttggtcaacctgggctttgcc

SEQ ID NO: 166 - DNA, 25 bp, Artificial Sequence
  Probe
gtatctatcctaaccagttcgggga

SEQ ID NO: 167 - DNA, 25 bp, Artificial Sequence
  Probe
catgtaatgctattacctctgcata

SEQ ID NO: 168 - DNA, 25 bp, Artificial Sequence
  Probe
gatgtgtagttcaccttacaactgc

SEQ ID NO: 169 - DNA, 25 bp, Artificial Sequence
  Probe
accttacaactgcaattttccctat

SEQ ID NO: 170 - DNA, 25 bp, Artificial Sequence
  Probe
gcaattttccctatgtggttttgta

SEQ ID NO: 171 - DNA, 25 bp, Artificial Sequence
  Probe
tgtaaagaactctcctcataggtga

SEQ ID NO: 172 - DNA, 25 bp, Artificial Sequence
  Probe
gagatcaagaggccaccagttgtac

SEQ ID NO: 173 - DNA, 25 bp, Artificial Sequence
  Probe
caccagttgtacttcagcaccaatg

SEQ ID NO: 174 - DNA, 25 bp, Artificial Sequence
  Probe
agcaccaatgtgtcttactttatag

SEQ ID NO: 175 - DNA, 25 bp, Artificial Sequence
  Probe
atgcagctactgtccaaactcaaag

SEQ ID NO: 176 - DNA, 25 bp, Artificial Sequence
  Probe
gcagccagttggttttgataggttg

SEQ ID NO: 177 - DNA, 25 bp, Artificial Sequence
  Probe
gaagggagcagcacacgcgttatag

SEQ ID NO: 178 - DNA, 25 bp, Artificial Sequence
  Probe
cgcgttatagtaactcccatcacct

SEQ ID NO: 179 - DNA, 25 bp, Artificial Sequence
  Probe
cacctctaacacgcacagctgaaag

SEQ ID NO: 180 - DNA, 25 bp, Artificial Sequence
  Probe
cgccctttcttagagtgcagttctt

SEQ ID NO: 181 - DNA, 25 bp, Artificial Sequence
  Probe
cccaccccaataagctgtagacatt

SEQ ID NO: 182 - DNA, 25 bp, Artificial Sequence
  Probe
tgctattctcagccctttgaaactc

SEQ ID NO: 183 - DNA, 25 bp, Artificial Sequence
  Probe
aaccccatcgccaactaagcgaggc

SEQ ID NO: 184 - DNA, 25 bp, Artificial Sequence
  Probe
gaagcgctcagaacagtatctttgc

SEQ ID NO: 185 - DNA, 25 bp, Artificial Sequence
  Probe
gtatctttgcactccaatcattcac

SEQ ID NO: 186 - DNA, 25 bp, Artificial Sequence
  Probe
gcaactgggacctgagtcaatgcgc

SEQ ID NO: 187 - DNA, 25 bp, Artificial Sequence
  Probe
tgcaaaagcagtgggctcctggcag

SEQ ID NO: 188 - DNA, 25 bp, Artificial Sequence
  Probe
ttagaaaactactcggatgctccaa

SEQ ID NO: 189 - DNA, 25 bp, Artificial Sequence
  Probe
ctactcggatgctccaatgacacca

SEQ ID NO: 190 - DNA, 25 bp, Artificial Sequence
  Probe
caatgacaccaaaacagattctgca

SEQ ID NO: 191 - DNA, 25 bp, Artificial Sequence
  Probe
tctcgcatgcctcaatgctatgcta

SEQ ID NO: 192 - DNA, 25 bp, Artificial Sequence
  Probe
cgcatgcctcaatgctatgctacat

SEQ ID NO: 193 - DNA, 25 bp, Artificial Sequence
  Probe
gcctcaatgctatgctacattccaa

SEQ ID NO: 194 - DNA, 25 bp, Artificial Sequence
  Probe
caatgctatgctacattccaattca

SEQ ID NO: 195 - DNA, 25 bp, Artificial Sequence
  Probe
tgttttataaactgcctggccgaat

SEQ ID NO: 196 - DNA, 25 bp, Artificial Sequence
  Probe
ataaactgcctggccgaatcagcct

SEQ ID NO: 197 - DNA, 25 bp, Artificial Sequence
  Probe
atcagccttttcacgctcaaggtgt

SEQ ID NO: 198 - DNA, 25 bp, Artificial Sequence
  Probe
gccttttcacgctcaaggtgtgagc

SEQ ID NO: 199 - DNA, 25 bp, Artificial Sequence
  Probe
tgtaaatgtcatctcagctggctca

SEQ ID NO: 200 - DNA, 25 bp, Artificial Sequence
  Probe
agctggctcagttatatctctaatg

SEQ ID NO: 201 - DNA, 25 bp, Artificial Sequence
  Probe
atctctaatgtcccgggtagcagca

SEQ ID NO: 202 - DNA, 25 bp, Artificial Sequence
  Probe
cagcacctccctctaaaaatatgtt

SEQ ID NO: 203 - DNA, 25 bp, Artificial Sequence
  Probe
aatatgtttacttcgctgtttcact

SEQ ID NO: 204 - DNA, 25 bp, Artificial Sequence
  Probe
aaatggcagcttccgatttctagtt

SEQ ID NO: 205 - DNA, 25 bp, Artificial Sequence
  Probe
tggtcacccagggctatttgctttt

SEQ ID NO: 206 - DNA, 25 bp, Artificial Sequence
  Probe
aggggtgtctagttcagcttttatg

SEQ ID NO: 207 - DNA, 25 bp, Artificial Sequence
  Probe
gttgatccatcctgacttattttag

SEQ ID NO: 208 - DNA, 25 bp, Artificial Sequence
  Probe
gacattgaatttatctcaccacaag

SEQ ID NO: 209 - DNA, 25 bp, Artificial Sequence
  Probe
gactgtctttgctaagtttcctaat

SEQ ID NO: 210 - DNA, 25 bp, Artificial Sequence
  Probe
aagcgacaagccactgtagaacctg

SEQ ID NO: 211 - DNA, 25 bp, Artificial Sequence
  Probe
aagccactgtagaacctgcgatcaa

SEQ ID NO: 212 - DNA, 25 bp, Artificial Sequence
  Probe
cactgtagaacctgcgatcaagaga

SEQ ID NO: 213 - DNA, 25 bp, Artificial Sequence
  Probe
gtagaacctgcgatcaagagagcac

SEQ ID NO: 214 - DNA, 25 bp, Artificial Sequence
  Probe
gaacctgcgatcaagagagcaccat

SEQ ID NO: 215 - DNA, 25 bp, Artificial Sequence
  Probe
agccaagagggtgctgctcagttgc

SEQ ID NO: 216 - DNA, 25 bp, Artificial Sequence
  Probe
ccaagagggtgctgctcagttgcag

SEQ ID NO: 217 - DNA, 25 bp, Artificial Sequence
  Probe
ggtgctgctcagttgcagggcctcc

SEQ ID NO: 218 - DNA, 25 bp, Artificial Sequence
  Probe
gctgctcagttgcagggcctccgca

SEQ ID NO: 219 - DNA, 25 bp, Artificial Sequence
  Probe
ctgctcagttgcagggcctccgcag

SEQ ID NO: 220 - DNA, 25 bp, Artificial Sequence
  Probe
agttgcagggcctccgcagctggac

SEQ ID NO: 221 - DNA, 25 bp, Artificial Sequence
  Probe
cagggcctccgcagctggacagaga

SEQ ID NO: 222 - DNA, 25 bp, Artificial Sequence
  Probe
acagaaagcgcacagaatcttggac

SEQ ID NO: 223 - DNA, 25 bp, Artificial Sequence
  Probe
cttggaccaggtctctcttccttgt

SEQ ID NO: 224 - DNA, 25 bp, Artificial Sequence
  Probe
tggaccaggtctctcttccttgtcc

SEQ ID NO: 225 - DNA, 25 bp, Artificial Sequence
  Probe
ctgccccgttggtgtgattatttca

SEQ ID NO: 226 - DNA, 25 bp, Artificial Sequence
  Probe
agagctgatcacaagcacaaatctt

SEQ ID NO: 227 - DNA, 25 bp, Artificial Sequence
  Probe
tgatcacaagcacaaatctttccca

SEQ ID NO: 228 - DNA, 25 bp, Artificial Sequence
  Probe
ctttcccactagccatttaataagt

SEQ ID NO: 229 - DNA, 25 bp, Artificial Sequence
  Probe
aacctactagtcttgaacaaactgt

SEQ ID NO: 230 - DNA, 25 bp, Artificial Sequence
  Probe
aactgtcatacgtatgggacctaca

SEQ ID NO: 231 - DNA, 25 bp, Artificial Sequence
  Probe
gtatgggacctacacttaatctata

SEQ ID NO: 232 - DNA, 25 bp, Artificial Sequence
  Probe
ggacctacacttaatctatatgctt

SEQ ID NO: 233 - DNA, 25 bp, Artificial Sequence
  Probe
acacttaatctatatgctttacact

SEQ ID NO: 234 - DNA, 25 bp, Artificial Sequence
  Probe
atatgctttacactagctttctgca

SEQ ID NO: 235 - DNA, 25 bp, Artificial Sequence
  Probe
gctttacactagctttctgcattta

SEQ ID NO: 236 - DNA, 25 bp, Artificial Sequence
  Probe
gctttctgcatttaataggttagaa

SEQ ID NO: 237 - DNA, 25 bp, Artificial Sequence
  Probe
ggtgatgggttgtgttatgcttgta

SEQ ID NO: 238 - DNA, 25 bp, Artificial Sequence
  Probe
gttatgcttgtattgaatgctgtct

SEQ ID NO: 239 - DNA, 25 bp, Artificial Sequence
  Probe
gaatgctgtcttgacatctcttgcc

SEQ ID NO: 240 - DNA, 25 bp, Artificial Sequence
  Probe
cttgtcctccggtatgttctaaagc

SEQ ID NO: 241 - DNA, 25 bp, Artificial Sequence
  Probe
tccggtatgttctaaagctgtgtct

SEQ ID NO: 242 - DNA, 25 bp, Artificial Sequence
  Probe
aagctgtgtctgagatctggatctg

SEQ ID NO: 243 - DNA, 25 bp, Artificial Sequence
  Probe
tctgagatctggatctgcccatcac

SEQ ID NO: 244 - DNA, 25 bp, Artificial Sequence
  Probe
gaggcatcacatgctggtgctgtgt

SEQ ID NO: 245 - DNA, 25 bp, Artificial Sequence
  Probe
ggtgctgtgtctttatgaatgtttt

SEQ ID NO: 246 - DNA, 25 bp, Artificial Sequence
  Probe
gactggtgttaaatgttgtctacag

SEQ ID NO: 247 - DNA, 25 bp, Artificial Sequence
  Probe
gatcttgtattcagtcaggttaaaa

SEQ ID NO: 248 - DNA, 25 bp, Artificial Sequence
  Probe
actttagctgtagaaccttgggcaa

SEQ ID NO: 249 - DNA, 25 bp, Artificial Sequence
  Probe
aactggagggactgtgatccttcca

SEQ ID NO: 250 - DNA, 25 bp, Artificial Sequence
  Probe
gaagaggcttacctgacagccagcc

SEQ ID NO: 251 - DNA, 25 bp, Artificial Sequence
  Probe
gagtcagctcattaaatcttgaaga

SEQ ID NO: 252 - DNA, 25 bp, Artificial Sequence
  Probe
tttccttctaagtcatgtctgctgc

SEQ ID NO: 253 - DNA, 25 bp, Artificial Sequence
  Probe
tctaagtcatgtctgctgcctgtga

SEQ ID NO: 254 - DNA, 25 bp, Artificial Sequence
  Probe
tgctgcctgtgagcctgggaaggag

SEQ ID NO: 255 - DNA, 25 bp, Artificial Sequence
  Probe
gagcctgggaaggagtgctttcaaa

SEQ ID NO: 256 - DNA, 25 bp, Artificial Sequence
  Probe
gagtgctttcaaaacctgtattttt

SEQ ID NO: 257 - DNA, 25 bp, Artificial Sequence
  Probe
gctcggccagagctctgggttttaa

SEQ ID NO: 258 - DNA, 25 bp, Artificial Sequence
  Probe
ctgggttttaatcctactttagctg

SEQ ID NO: 259 - DNA, 25 bp, Artificial Sequence
  Probe
ggagacccgagagaaggagccaccg

SEQ ID NO: 260 - DNA, 25 bp, Artificial Sequence
  Probe
tcttgccaccctgcatgttgaagtc

SEQ ID NO: 261 - DNA, 25 bp, Artificial Sequence
  Probe
ttgaagtccccgaagcggatctgcc

SEQ ID NO: 262 - DNA, 25 bp, Artificial Sequence
  Probe
tagaacagtatttgcgtacccctca

SEQ ID NO: 263 - DNA, 25 bp, Artificial Sequence
  Probe
tttgcgtacccctcaggaagttagg

SEQ ID NO: 264 - DNA, 25 bp, Artificial Sequence
  Probe
tagggactttcagagagcccaggct

SEQ ID NO: 265 - DNA, 25 bp, Artificial Sequence
  Probe
gatatccactgggagcacttcatcc

SEQ ID NO: 266 - DNA, 25 bp, Artificial Sequence
  Probe
tgtgctgctgcggatggctgagcag

SEQ ID NO: 267 - DNA, 25 bp, Artificial Sequence
  Probe
ctggcctggttacgagttctgagac

SEQ ID NO: 268 - DNA, 25 bp, Artificial Sequence
  Probe
gacttgacaaacggtctgtggtgaa

SEQ ID NO: 269 - DNA, 25 bp, Artificial Sequence
  Probe
gtgaagcacatcggtgaccttctcc

SEQ ID NO: 270 - DNA, 25 bp, Artificial Sequence
  Probe
aggaaccaagaggggctctgccatt

SEQ ID NO: 271 - DNA, 25 bp, Artificial Sequence
  Probe
ctctgccattagttggaccctgggt

SEQ ID NO: 272 - DNA, 25 bp, Artificial Sequence
  Probe
gaccctgggtcctggagtaaagtca

SEQ ID NO: 273 - DNA, 25 bp, Artificial Sequence
  Probe
gagattcccatcccttggtgtggga

SEQ ID NO: 274 - DNA, 25 bp, Artificial Sequence
  Probe
agagcaagttgcctatgtccatgtt

SEQ ID NO: 275 - DNA, 25 bp, Artificial Sequence
  Probe
gttctgtgagatggctttcctcata

SEQ ID NO: 276 - DNA, 25 bp, Artificial Sequence
  Probe
ggctctttgctgctggtttgaattg

SEQ ID NO: 277 - DNA, 25 bp, Artificial Sequence
  Probe
ggtttgaattggacacactgctgcg

SEQ ID NO: 278 - DNA, 25 bp, Artificial Sequence
  Probe
cttccctctgcttgtggagtggttg

SEQ ID NO: 279 - DNA, 25 bp, Artificial Sequence
  Probe
gaactggggaattctggccctacgt

SEQ ID NO: 280 - DNA, 25 bp, Artificial Sequence
  Probe
tatggtgtcatgagatcctctacct

SEQ ID NO: 281 - DNA, 25 bp, Artificial Sequence
  Probe
ttctttgtgcggattctgaatgcca

SEQ ID NO: 282 - DNA, 25 bp, Artificial Sequence
  Probe
tggggtttttgacactacattccaa

SEQ ID NO: 283 - DNA, 25 bp, Artificial Sequence
  Probe
gttaactagtcctggggctttgctc

SEQ ID NO: 284 - DNA, 25 bp, Artificial Sequence
  Probe
ggggctttgctctttcagtgagcta

SEQ ID NO: 285 - DNA, 25 bp, Artificial Sequence
  Probe
gagctaggcaatcaagtctcacaga

SEQ ID NO: 286 - DNA, 25 bp, Artificial Sequence
  Probe
gtctcacagattgctgcctcagagc

SEQ ID NO: 287 - DNA, 25 bp, Artificial Sequence
  Probe
ggacacatttagatgcactaccatt

SEQ ID NO: 288 - DNA, 25 bp, Artificial Sequence
  Probe
cactaccattgctgttctacttttt

SEQ ID NO: 289 - DNA, 25 bp, Artificial Sequence
  Probe
ggtacaggtatattttgacgtcact

SEQ ID NO: 290 - DNA, 25 bp, Artificial Sequence
  Probe
ggccttgtctaacttttgtgaagaa

SEQ ID NO: 291 - DNA, 25 bp, Artificial Sequence
  Probe
gttctcttatgatcaccatgtattt

SEQ ID NO: 292 - DNA, 25 bp, Artificial Sequence
  Probe
ttcaaaagtgcccatacgccagtca

SEQ ID NO: 293 - DNA, 25 bp, Artificial Sequence
  Probe
gctaaacagcagtaacatccttggg

SEQ ID NO: 294 - DNA, 25 bp, Artificial Sequence
  Probe
aacatccttgggagtctggaatctt

SEQ ID NO: 295 - DNA, 25 bp, Artificial Sequence
  Probe
gaaattccccatcatgaatcttcaa

SEQ ID NO: 296 - DNA, 25 bp, Artificial Sequence
  Probe
agagcaatcagatgtcaccacatct

SEQ ID NO: 297 - DNA, 25 bp, Artificial Sequence
  Probe
atctgagagaaccagaagtcctcca

SEQ ID NO: 298 - DNA, 25 bp, Artificial Sequence
  Probe
aaaatcccacaaagtcagcagcaga

SEQ ID NO: 299 - DNA, 25 bp, Artificial Sequence
  Probe
gggaccaatcttagagatcctccaa

SEQ ID NO: 300 - DNA, 25 bp, Artificial Sequence
  Probe
gaaagccagtgacaagtagggatgc

SEQ ID NO: 301 - DNA, 25 bp, Artificial Sequence
  Probe
gtttctaagatcttttggtgccaaa

SEQ ID NO: 302 - DNA, 25 bp, Artificial Sequence
  Probe
gtcatctggcaaaacatttacctgt

SEQ ID NO: 303 - DNA, 25 bp, Artificial Sequence
  Probe
gtacataacagtaagcgcactagtc

SEQ ID NO: 304 - DNA, 25 bp, Artificial Sequence
  Probe
acaagggtcaaagcccaggacaagt

SEQ ID NO: 305 - DNA, 25 bp, Artificial Sequence
  Probe
aagggccagtgtgcagatgggtgga

SEQ ID NO: 306 - DNA, 25 bp, Artificial Sequence
  Probe
gtactaaagggcttacttcaggcaa

SEQ ID NO: 307 - DNA, 25 bp, Artificial Sequence
  Probe
ggcaaaagtgttcctgacgtaccaa

SEQ ID NO: 308 - DNA, 25 bp, Artificial Sequence
  Probe
ctccctgctcctagtaatgtatgtt

SEQ ID NO: 309 - DNA, 25 bp, Artificial Sequence
  Probe
aatgtatgttttgtgctgaactggc

SEQ ID NO: 310 - DNA, 25 bp, Artificial Sequence
  Probe
tgaactggcagctatcccaatgtga

SEQ ID NO: 311 - DNA, 25 bp, Artificial Sequence
  Probe
cagacaatgatttacacagctcaga

SEQ ID NO: 312 - DNA, 25 bp, Artificial Sequence
  Probe
agctcagataattgacctgtccagt

SEQ ID NO: 313 - DNA, 25 bp, Artificial Sequence
  Probe
gtccagttaacagatcattgcttca

SEQ ID NO: 314 - DNA, 25 bp, Artificial Sequence
  Probe
tcaagggaagtgtggctgggggcgc

SEQ ID NO: 315 - DNA, 25 bp, Artificial Sequence
  Probe
cgccgtctacctggtgtacgaccag

SEQ ID NO: 316 - DNA, 25 bp, Artificial Sequence
  Probe
cagttcagccagtacgtgtgtcagc

SEQ ID NO: 317 - DNA, 25 bp, Artificial Sequence
  Probe
acgtgtgtcagcagacaggcctgca

SEQ ID NO: 318 - DNA, 25 bp, Artificial Sequence
  Probe
caaagatttactttcccatccgtga

SEQ ID NO: 319 - DNA, 25 bp, Artificial Sequence
  Probe
gtgactcctggaatgcaggcatcat

SEQ ID NO: 320 - DNA, 25 bp, Artificial Sequence
  Probe
tcatgacggtgatgtcagctctgtc

SEQ ID NO: 321 - DNA, 25 bp, Artificial Sequence
  Probe
gggctgggagtatgtgaaggcgcgc

SEQ ID NO: 322 - DNA, 25 bp, Artificial Sequence
  Probe
ggcgcgcaccaagtagcgagtcagc

SEQ ID NO: 323 - DNA, 25 bp, Artificial Sequence
  Probe
gcctgccccggccagaacgggcagg

SEQ ID NO: 324 - DNA, 25 bp, Artificial Sequence
  Probe
gtggtcgctgatgaggttcctcatc

SEQ ID NO: 325 - DNA, 25 bp, Artificial Sequence
  Probe
gaggagatgttacggcagctgggcc

SEQ ID NO: 326 - DNA, 25 bp, Artificial Sequence
  Probe
aggcggctttccaaaggatgctggc

SEQ ID NO: 327 - DNA, 25 bp, Artificial Sequence
  Probe
gactctgaacaactcccttcagtaa

SEQ ID NO: 328 - DNA, 25 bp, Artificial Sequence
  Probe
cactggcagtggctggtacttggct

SEQ ID NO: 329 - DNA, 25 bp, Artificial Sequence
  Probe
cttggctctcagcctggagtggcag

SEQ ID NO: 330 - DNA, 25 bp, Artificial Sequence
  Probe
agctctgctagcagctgggttcact

SEQ ID NO: 331 - DNA, 25 bp, Artificial Sequence
  Probe
aatgcagccaatgaatacccagtct

SEQ ID NO: 332 - DNA, 25 bp, Artificial Sequence
  Probe
atacccagtctgattacccagattt

SEQ ID NO: 333 - DNA, 25 bp, Artificial Sequence
  Probe
agcagtgctcgccagagtggtctgg

SEQ ID NO: 334 - DNA, 25 bp, Artificial Sequence
  Probe
gtctggcctgctatgggggatccag

SEQ ID NO: 335 - DNA, 25 bp, Artificial Sequence
  Probe
ggatccaggtggtgttacatgtcca

SEQ ID NO: 336 - DNA, 25 bp, Artificial Sequence
  Probe
gggctttgttcattctagccacggg

SEQ ID NO: 337 - DNA, 25 bp, Artificial Sequence
  Probe
gtgcacatgctgttagggctgtcac

SEQ ID NO: 338 - DNA, 25 bp, Artificial Sequence
  Probe
gggctgtcactagggagtggccttc

SEQ ID NO: 339 - DNA, 25 bp, Artificial Sequence
  Probe
gagggtggtaacagcacctcagtcc

SEQ ID NO: 340 - DNA, 25 bp, Artificial Sequence
  Probe
ttagaaacactcagtctctggtccc

SEQ ID NO: 341 - DNA, 25 bp, Artificial Sequence
  Probe
tctggtcccagaggatggcttctca

SEQ ID NO: 342 - DNA, 25 bp, Artificial Sequence
  Probe
tggcttctcagggcatgccacaagt

SEQ ID NO: 343 - DNA, 25 bp, Artificial Sequence
  Probe
cattctcaagactcatctgcctagg

SEQ ID NO: 344 - DNA, 25 bp, Artificial Sequence
  Probe
agacacactgtgttgcattcttgca

SEQ ID NO: 345 - DNA, 25 bp, Artificial Sequence
  Probe
acagcacatgacaccgacagctgcc

SEQ ID NO: 346 - DNA, 25 bp, Artificial Sequence
  Probe
ccagcacagcacctgaagccatgtg

SEQ ID NO: 347 - DNA, 25 bp, Artificial Sequence
  Probe
tatatgtgtggcttaggaccctccg

SEQ ID NO: 348 - DNA, 25 bp, Artificial Sequence
  Probe
ggaccctccgtgaacagatgataga

SEQ ID NO: 349 - DNA, 25 bp, Artificial Sequence
  Probe
atgatagagggcatctctcccaggt

SEQ ID NO: 350 - DNA, 25 bp, Artificial Sequence
  Probe
cttcttttctgtcccaggagggtgg

SEQ ID NO: 351 - DNA, 25 bp, Artificial Sequence
  Probe
ccactcagaccagcaccagtgtctg

SEQ ID NO: 352 - DNA, 25 bp, Artificial Sequence
  Probe
gagaatgttggcagctcacagagag

SEQ ID NO: 353 - DNA, 25 bp, Artificial Sequence
  Probe
ttaccgttttttgtacttgatgcct

SEQ ID NO: 354 - DNA, 25 bp, Artificial Sequence
  Probe
tgtacttgatgccttctctgtgagc

SEQ ID NO: 355 - DNA, 25 bp, Artificial Sequence
  Probe
ctctgtgagcagtggctctgtggga

SEQ ID NO: 356 - DNA, 25 bp, Artificial Sequence
  Probe
tgatggagccacgcaaggctgcacc

SEQ ID NO: 357 - DNA, 25 bp, Artificial Sequence
  Probe
attgctgtgtgatggcttggaattt

SEQ ID NO: 358 - DNA, 25 bp, Artificial Sequence
  Probe
gatgcctgttgcaaagtggaccatg

SEQ ID NO: 359 - DNA, 25 bp, Artificial Sequence
  Probe
tggaccatggtctagcagtagcatc

SEQ ID NO: 360 - DNA, 25 bp, Artificial Sequence
  Probe
atggtctagcagtagcatcagtgtc

SEQ ID NO: 361 - DNA, 25 bp, Artificial Sequence
  Probe
ctagcagtagcatcagtgtcaagga

SEQ ID NO: 362 - DNA, 25 bp, Artificial Sequence
  Probe
aacacccactacttagcagactggg

SEQ ID NO: 363 - DNA, 25 bp, Artificial Sequence
  Probe
ccactacttagcagactgggaaaag

SEQ ID NO: 364 - DNA, 25 bp, Artificial Sequence
  Probe
gaaagtactaaatgtctgatatgca

SEQ ID NO: 365 - DNA, 25 bp, Artificial Sequence
  Probe
ggacacatgacccatgtgaccttac

SEQ ID NO: 366 - DNA, 25 bp, Artificial Sequence
  Probe
cacatgacccatgtgaccttaccta

SEQ ID NO: 367 - DNA, 25 bp, Artificial Sequence
  Probe
catgtgaccttacctattattggag

SEQ ID NO: 368 - DNA, 25 bp, Artificial Sequence
  Probe
attggagatggttcacattccttac

SEQ ID NO: 369 - DNA, 25 bp, Artificial Sequence
  Probe
gctattggagcaatccgaaccctgc

SEQ ID NO: 370 - DNA, 25 bp, Artificial Sequence
  Probe
tgcgcagcaaaagaacgcccttgcc

SEQ ID NO: 371 - DNA, 25 bp, Artificial Sequence
  Probe
tggaagccgaatggcgtgaggccct

SEQ ID NO: 372 - DNA, 25 bp, Artificial Sequence
  Probe
ctgctgcttattcagcccaggtgca

SEQ ID NO: 373 - DNA, 25 bp, Artificial Sequence
  Probe
gcaacctgtagatggagccaccaga

SEQ ID NO: 374 - DNA, 25 bp, Artificial Sequence
  Probe
aagagccaaagggtctgcaggcctc

SEQ ID NO: 375 - DNA, 25 bp, Artificial Sequence
  Probe
tgcaggcctcgctctatatggagag

SEQ ID NO: 376 - DNA, 25 bp, Artificial Sequence
  Probe
ggggtttgttttgagtgcagagcct

SEQ ID NO: 377 - DNA, 25 bp, Artificial Sequence
  Probe
cctttccaggacttctgttgtcaga

SEQ ID NO: 378 - DNA, 25 bp, Artificial Sequence
  Probe
tccctggctggtccaaggatttgta

SEQ ID NO: 379 - DNA, 25 bp, Artificial Sequence
  Probe
cagataggcaaaagaccccgttcgt

SEQ ID NO: 380 - DNA, 25 bp, Artificial Sequence
  Probe
agcagccaatcgtgttgccaactgt

SEQ ID NO: 381 - DNA, 25 bp, Artificial Sequence
  Probe
tgttgccaactgtttggcgtccacc

SEQ ID NO: 382 - DNA, 25 bp, Artificial Sequence
  Probe
gccgccatgcttctgaggggcggaa

SEQ ID NO: 383 - DNA, 25 bp, Artificial Sequence
  Probe
ttcagtagcgcggcgtcacagtgtc

SEQ ID NO: 384 - DNA, 25 bp, Artificial Sequence
  Probe
gtcacagtgtcccttcgggacttgt

SEQ ID NO: 385 - DNA, 25 bp, Artificial Sequence
  Probe
cccttcgggacttgtgtgggacgct

SEQ ID NO: 386 - DNA, 25 bp, Artificial Sequence
  Probe
gctccaaaacacatcggctcatggc

SEQ ID NO: 387 - DNA, 25 bp, Artificial Sequence
  Probe
cttcggttgggaggccttgttatgc

SEQ ID NO: 388 - DNA, 25 bp, Artificial Sequence
  Probe
tatggccctgacttgcggcgaaaat

SEQ ID NO: 389 - DNA, 25 bp, Artificial Sequence
  Probe
gcgaaaatctggcaagtcctttccc

SEQ ID NO: 390 - DNA, 25 bp, Artificial Sequence
  Probe
cctctccagctaataaaagttttct

SEQ ID NO: 391 - DNA, 25 bp, Artificial Sequence
  Probe
cactgccatgaccaggccgaaggca

SEQ ID NO: 392 - DNA, 25 bp, Artificial Sequence
  Probe
gaccaggccgaaggcagggaacgcc

SEQ ID NO: 393 - DNA, 25 bp, Artificial Sequence
  Probe
aaagcaaggcagccgtgctgttcta

SEQ ID NO: 394 - DNA, 25 bp, Artificial Sequence
  Probe
caaggcagccgtgctgttctagttc

SEQ ID NO: 395 - DNA, 25 bp, Artificial Sequence
  Probe
gccccagaagtttctatcattccat

SEQ ID NO: 396 - DNA, 25 bp, Artificial Sequence
  Probe
gaagtttctatcattccatggagaa

SEQ ID NO: 397 - DNA, 25 bp, Artificial Sequence
  Probe
gctgtgttccaatgaatcctacctc

SEQ ID NO: 398 - DNA, 25 bp, Artificial Sequence
  Probe
tcttgcccagtcccaggcagagtaa

SEQ ID NO: 399 - DNA, 25 bp, Artificial Sequence
  Probe
gcccagtcccaggcagagtaagcag

SEQ ID NO: 400 - DNA, 25 bp, Artificial Sequence
  Probe
ggcccacctagggaccaagaaagag

SEQ ID NO: 401 - DNA, 25 bp, Artificial Sequence
  Probe
gaagaaggggacgagccgggagcaa

SEQ ID NO: 402 - DNA, 25 bp, Artificial Sequence
  Probe
ctttttgtcacacaggatggcatgt

SEQ ID NO: 403 - DNA, 25 bp, Artificial Sequence
  Probe
gcatgtgatcctcaagacgacgaac

SEQ ID NO: 404 - DNA, 25 bp, Artificial Sequence
  Probe
gccgagctacaggtaccggcgacgg

SEQ ID NO: 405 - DNA, 25 bp, Artificial Sequence
  Probe
acgtgtcgcccatgggcctgaagat

SEQ ID NO: 406 - DNA, 25 bp, Artificial Sequence
  Probe
gcctgaagatcacaggggccatccc

SEQ ID NO: 407 - DNA, 25 bp, Artificial Sequence
  Probe
ccatgggggagctgtccatgtacac

SEQ ID NO: 408 - DNA, 25 bp, Artificial Sequence
  Probe
tccatgtacacgctgtccagggagc

SEQ ID NO: 409 - DNA, 25 bp, Artificial Sequence
  Probe
agcttcctgcaggtgcatgactttt

SEQ ID NO: 410 - DNA, 25 bp, Artificial Sequence
  Probe
gactttttccagcaggacctgaagg

SEQ ID NO: 411 - DNA, 25 bp, Artificial Sequence
  Probe
aaggaaggtttccacgtcagcatgc

SEQ ID NO: 412 - DNA, 25 bp, Artificial Sequence
  Probe
tcagcatgctgaaccgacggacgac

SEQ ID NO: 413 - DNA, 25 bp, Artificial Sequence
  Probe
ccgggccttctcagccttctccccg

SEQ ID NO: 414 - DNA, 25 bp, Artificial Sequence
  Probe
gggccttctcagccttctccccgcg

SEQ ID NO: 415 - DNA, 25 bp, Artificial Sequence
  Probe
tctccccgcggccagctgggtctcc

SEQ ID NO: 416 - DNA, 25 bp, Artificial Sequence
  Probe
gcggccagctgggtctccggggacc

SEQ ID NO: 417 - DNA, 25 bp, Artificial Sequence
  Probe
ggccagctgggtctccggggaccct

SEQ ID NO: 418 - DNA, 25 bp, Artificial Sequence
  Probe
gccctgggccgcccattcctggccc

SEQ ID NO: 419 - DNA, 25 bp, Artificial Sequence
  Probe
tgggccgcccattcctggccctccc

SEQ ID NO: 420 - DNA, 25 bp, Artificial Sequence
  Probe
ccctcccgctgcatctcagacctga

SEQ ID NO: 421 - DNA, 25 bp, Artificial Sequence
  Probe
gctgcatctcagacctgacacccaa

SEQ ID NO: 422 - DNA, 25 bp, Artificial Sequence
  Probe
tgcatctcagacctgacacccaacg

SEQ ID NO: 423 - DNA, 25 bp, Artificial Sequence
  Probe
gcatctcagacctgacacccaacgg

SEQ ID NO: 424 - DNA, 25 bp, Artificial Sequence
  Probe
tggcctgtgcccaccttctctccct

SEQ ID NO: 425 - DNA, 25 bp, Artificial Sequence
  Probe
cctccctggcctccagaggtggcgt

SEQ ID NO: 426 - DNA, 25 bp, Artificial Sequence
  Probe
ccccacccctgtgtgtttcgccagt

SEQ ID NO: 427 - DNA, 25 bp, Artificial Sequence
  Probe
tactggttttgggttggttgttctg

SEQ ID NO: 428 - DNA, 25 bp, Artificial Sequence
  Probe
tgtgctgggagaccggacccggggc

SEQ ID NO: 429 - DNA, 25 bp, Artificial Sequence
  Probe
attagtaccctggtcattttgttca

SEQ ID NO: 430 - DNA, 25 bp, Artificial Sequence
  Probe
gggttatattgcattctcacgtgaa

SEQ ID NO: 431 - DNA, 25 bp, Artificial Sequence
  Probe
atctcttgaaacccatctctgtgga

SEQ ID NO: 432 - DNA, 25 bp, Artificial Sequence
  Probe
aacccatctctgtggaaggcagttc

SEQ ID NO: 433 - DNA, 25 bp, Artificial Sequence
  Probe
caaggtgggattacctgacccaggt

SEQ ID NO: 434 - DNA, 25 bp, Artificial Sequence
  Probe
aaagagaagccctcctatgacactg

SEQ ID NO: 435 - DNA, 25 bp, Artificial Sequence
  Probe
agccctcctatgacactgaaacaga

SEQ ID NO: 436 - DNA, 25 bp, Artificial Sequence
  Probe
ggagacacggaattttgagacttta

SEQ ID NO: 437 - DNA, 25 bp, Artificial Sequence
  Probe
aaaggcaatgaattctccatttcct

SEQ ID NO: 438 - DNA, 25 bp, Artificial Sequence
  Probe
aaatatgcttattaaacactcctgc

SEQ ID NO: 439 - DNA, 25 bp, Artificial Sequence
  Probe
acactcctgcaaagatggttttatt

SEQ ID NO: 440 - DNA, 25 bp, Artificial Sequence
  Probe
tactgaaacacattatgcctctgta

SEQ ID NO: 441 - DNA, 25 bp, Artificial Sequence
  Probe
atgcctctgtaattggggttgacac

SEQ ID NO: 442 - DNA, 25 bp, Artificial Sequence
  Probe
ggggttgacacatgaacagaatagc

SEQ ID NO: 443 - DNA, 25 bp, Artificial Sequence
  Probe
gaatagcagacacaatgcatatgaa

SEQ ID NO: 444 - DNA, 25 bp, Artificial Sequence
  Probe
tatagatatattccaagccgcctga

SEQ ID NO: 445 - DNA, 25 bp, Artificial Sequence
  Probe
caagccgcctgacgatctaattgta

SEQ ID NO: 446 - DNA, 25 bp, Artificial Sequence
  Probe
gacattatatgtgacttaaaaccta

SEQ ID NO: 447 - DNA, 25 bp, Artificial Sequence
  Probe
actattgatcaattttaactacata

SEQ ID NO: 448 - DNA, 25 bp, Artificial Sequence
  Probe
cccaccataacccaaggcaaacaat

SEQ ID NO: 449 - DNA, 25 bp, Artificial Sequence
  Probe
aaacaatgtattgacaggattccaa

SEQ ID NO: 450 - DNA, 25 bp, Artificial Sequence
  Probe
catgtaaagatgctcaccttgttca

SEQ ID NO: 451 - DNA, 25 bp, Artificial Sequence
  Probe
gaagagttactccatgattgtgaac

SEQ ID NO: 452 - DNA, 25 bp, Artificial Sequence
  Probe
tgaacaatctcttgaaacccatctc

SEQ ID NO: 453 - DNA, 25 bp, Artificial Sequence
  Probe
atctctgtggaaggcagttcaaaaa

SEQ ID NO: 454 - DNA, 25 bp, Artificial Sequence
  Probe
gactgatacagttcttatattgtgt

SEQ ID NO: 455 - DNA, 25 bp, Artificial Sequence
  Probe
caaggtgggattacctgacccaggt

SEQ ID NO: 456 - DNA, 25 bp, Artificial Sequence
  Probe
ctgacccaggttgaaaaggagtgca

SEQ ID NO: 457 - DNA, 25 bp, Artificial Sequence
  Probe
gaaacagatcctagtgagggattga

SEQ ID NO: 458 - DNA, 25 bp, Artificial Sequence
  Probe
tgaagcgaaccattaataaagcctg

SEQ ID NO: 459 - DNA, 25 bp, Artificial Sequence
  Probe
aaagcctgggtggaatcaagagaga

SEQ ID NO: 460 - DNA, 25 bp, Artificial Sequence
  Probe
gtaagggaatattggtgagctgcat

SEQ ID NO: 461 - DNA, 25 bp, Artificial Sequence
  Probe
aatttgacagatagctatttacata

SEQ ID NO: 462 - DNA, 25 bp, Artificial Sequence
  Probe
gcagtggctgaatttatcccctgaa

SEQ ID NO: 463 - DNA, 25 bp, Artificial Sequence
  Probe
gaggccttcccctgtgggaatagaa

SEQ ID NO: 464 - DNA, 25 bp, Artificial Sequence
  Probe
tgggaatagaatcgtccactcctag

SEQ ID NO: 465 - DNA, 25 bp, Artificial Sequence
  Probe
agccctggttgcttctgatacacag

SEQ ID NO: 466 - DNA, 25 bp, Artificial Sequence
  Probe
ttctgatacacagccactgcacaca

SEQ ID NO: 467 - DNA, 25 bp, Artificial Sequence
  Probe
taccctctcttatttggagtttccg

SEQ ID NO: 468 - DNA, 25 bp, Artificial Sequence
  Probe
tggagtttccgttggtttacctgag

SEQ ID NO: 469 - DNA, 25 bp, Artificial Sequence
  Probe
tctctggggtctgcacagaggcagc

SEQ ID NO: 470 - DNA, 25 bp, Artificial Sequence
  Probe
cagtttcattggttcctctttctgt

SEQ ID NO: 471 - DNA, 25 bp, Artificial Sequence
  Probe
gtgccttctgtgaggaatgggggga

SEQ ID NO: 472 - DNA, 25 bp, Artificial Sequence
  Probe
gtccccccacagcaataaaagcttc

SEQ ID NO: 473 - DNA, 25 bp, Artificial Sequence
  Probe
aactcggcctggtgtttgacaatgt

SEQ ID NO: 474 - DNA, 25 bp, Artificial Sequence
  Probe
gaagtgatcaactcccaggacattc

SEQ ID NO: 475 - DNA, 25 bp, Artificial Sequence
  Probe
ggttgccacatatacctcagtgaag

SEQ ID NO: 476 - DNA, 25 bp, Artificial Sequence
  Probe
agatcgtgagcgccaagtcatctga

SEQ ID NO: 477 - DNA, 25 bp, Artificial Sequence
  Probe
atgaacatacttatccctcaggatg

SEQ ID NO: 478 - DNA, 25 bp, Artificial Sequence
  Probe
ttatggcctaacttcctgagagacc

SEQ ID NO: 479 - DNA, 25 bp, Artificial Sequence
  Probe
tgaatccccctctatcaaacaaaca

SEQ ID NO: 480 - DNA, 25 bp, Artificial Sequence
  Probe
gcctccaacgattctgtgctataga

SEQ ID NO: 481 - DNA, 25 bp, Artificial Sequence
  Probe
agatacagcactgtttctggcacgc

SEQ ID NO: 482 - DNA, 25 bp, Artificial Sequence
  Probe
gcacgcctcgtgggcattttgaaat

SEQ ID NO: 483 - DNA, 25 bp, Artificial Sequence
  Probe
taacgtttcctcatgatttgccttt

SEQ ID NO: 484 - DNA, 25 bp, Artificial Sequence
  Probe
aatcaagctcagttattattttcca

SEQ ID NO: 485 - DNA, 25 bp, Artificial Sequence
  Probe
ttatgtctttaacgttttcttatag

SEQ ID NO: 486 - DNA, 25 bp, Artificial Sequence
  Probe
ttcttatagactaatttcctctttt

SEQ ID NO: 487 - DNA, 25 bp, Artificial Sequence
  Probe
cttgctgctcctattttgtagtctt

SEQ ID NO: 488 - DNA, 25 bp, Artificial Sequence
  Probe
gatgcttcttcagcgtaagagtagc

SEQ ID NO: 489 - DNA, 25 bp, Artificial Sequence
  Probe
gagtagctatgatattcctttttat

SEQ ID NO: 490 - DNA, 25 bp, Artificial Sequence
  Probe
aaatctgcaacttcttggatcatat

SEQ ID NO: 491 - DNA, 25 bp, Artificial Sequence
  Probe
gtataatgcttgcaggcccagtaca

SEQ ID NO: 492 - DNA, 25 bp, Artificial Sequence
  Probe
atatattgtgcctcttacagccttt

SEQ ID NO: 493 - DNA, 25 bp, Artificial Sequence
  Probe
gtgcctcttacagcctttggaatac

SEQ ID NO: 494 - DNA, 25 bp, Artificial Sequence
  Probe
aatgctcatgtaccaaggttttgct

SEQ ID NO: 495 - DNA, 25 bp, Artificial Sequence
  Probe
gacacgaggcccttggcagggaata

SEQ ID NO: 496 - DNA, 25 bp, Artificial Sequence
  Probe
cagtccaagattaccatttcccatg

SEQ ID NO: 497 - DNA, 25 bp, Artificial Sequence
  Probe
tcacctctgtcgcttgggttaaaca

SEQ ID NO: 498 - DNA, 25 bp, Artificial Sequence
  Probe
aatcgttctccttacaatcaagttc

SEQ ID NO: 499 - DNA, 25 bp, Artificial Sequence
  Probe
aatcaagttcttgaccctattcggc

SEQ ID NO: 500 - DNA, 25 bp, Artificial Sequence
  Probe
ttcggccttatacatctggtcttac

SEQ ID NO: 501 - DNA, 25 bp, Artificial Sequence
  Probe
atcctgcgcttgatcaactgaacca

SEQ ID NO: 502 - DNA, 25 bp, Artificial Sequence
  Probe
ataagctgtttgccacctcaaaact

SEQ ID NO: 503 - DNA, 25 bp, Artificial Sequence
  Probe
tatgaacttcaccaccactagtgtc

SEQ ID NO: 504 - DNA, 25 bp, Artificial Sequence
  Probe
accactagtgtctgtccatggagtt

SEQ ID NO: 505 - DNA, 25 bp, Artificial Sequence
  Probe
tgccttatcttcttccaaatgtact

SEQ ID NO: 506 - DNA, 25 bp, Artificial Sequence
  Probe
actgattataaccactcgggcacca

SEQ ID NO: 507 - DNA, 25 bp, Artificial Sequence
  Probe
gatgcccacgagatgaggacagccc

SEQ ID NO: 508 - DNA, 25 bp, Artificial Sequence
  Probe
acagccaggtgcagcagaccattgc

SEQ ID NO: 509 - DNA, 25 bp, Artificial Sequence
  Probe
gcggtatgcgtgcagcaagcttggc

SEQ ID NO: 510 - DNA, 25 bp, Artificial Sequence
  Probe
catcaactttgacagcttcgtggct

SEQ ID NO: 511 - DNA, 25 bp, Artificial Sequence
  Probe
tcgtggcttgtatgatccgcctgga

SEQ ID NO: 512 - DNA, 25 bp, Artificial Sequence
  Probe
cctcttcaaactattcagccttctg

SEQ ID NO: 513 - DNA, 25 bp, Artificial Sequence
  Probe
tggtctgacccggggtttcggacat

SEQ ID NO: 514 - DNA, 25 bp, Artificial Sequence
  Probe
ggtttcggacatcagtgacactccc

SEQ ID NO: 515 - DNA, 25 bp, Artificial Sequence
  Probe
actggttgttcatacctttcttgcc

SEQ ID NO: 516 - DNA, 25 bp, Artificial Sequence
  Probe
ctttcttgccctgggtctatttcag

SEQ ID NO: 517 - DNA, 25 bp, Artificial Sequence
  Probe
atgaagctcatatccttttgaaggt

SEQ ID NO: 518 - DNA, 25 bp, Artificial Sequence
  Probe
gagacatttcaaaactgccctaggc

SEQ ID NO: 519 - DNA, 25 bp, Artificial Sequence
  Probe
cctaggccattgcagcatccttaga

SEQ ID NO: 520 - DNA, 25 bp, Artificial Sequence
  Probe
gatgggacgcataatcattacctta

SEQ ID NO: 521 - DNA, 25 bp, Artificial Sequence
  Probe
attaccttaaagcatcaccactcat

SEQ ID NO: 522 - DNA, 25 bp, Artificial Sequence
  Probe
aagcatcaccactcattttgaccat

SEQ ID NO: 523 - DNA, 25 bp, Artificial Sequence
  Probe
aaggtcaatcagcctcatgacttta

SEQ ID NO: 524 - DNA, 25 bp, Artificial Sequence
  Probe
gctatcctttcaaacagctattggc

SEQ ID NO: 525 - DNA, 25 bp, Artificial Sequence
  Probe
aagtaacatgacttccttatttctg

SEQ ID NO: 526 - DNA, 25 bp, Artificial Sequence
  Probe
aaatccaggctttatgtacaaacat

SEQ ID NO: 527 - DNA, 25 bp, Artificial Sequence
  Probe
gatgagcagacttctcggaattcat

SEQ ID NO: 528 - DNA, 25 bp, Artificial Sequence
  Probe
aaagcacacaacgattatagtaact

SEQ ID NO: 529 - DNA, 25 bp, Artificial Sequence
  Probe
tcctacaggcctatttaacaagatg

SEQ ID NO: 530 - DNA, 25 bp, Artificial Sequence
  Probe
aaatgttgctctaatcagattgctt

SEQ ID NO: 531 - DNA, 25 bp, Artificial Sequence
  Probe
atgtagctcccacaaggtaaacttc

SEQ ID NO: 532 - DNA, 25 bp, Artificial Sequence
  Probe
aaacttcattggtaagattgcactg

SEQ ID NO: 533 - DNA, 25 bp, Artificial Sequence
  Probe
gattgcactgttctgattatgtaag

SEQ ID NO: 534 - DNA, 25 bp, Artificial Sequence
  Probe
gttgacaccacttagatttaaaggc

SEQ ID NO: 535 - DNA, 25 bp, Artificial Sequence
  Probe
aaggcagacagttttgctttagtac

SEQ ID NO: 536 - DNA, 25 bp, Artificial Sequence
  Probe
tacctttacatatatagtcactggc

SEQ ID NO: 537 - DNA, 25 bp, Artificial Sequence
  Probe
agtcactggcatactgagaatatac

SEQ ID NO: 538 - DNA, 25 bp, Artificial Sequence
  Probe
gagaatatacaatgatcctggaaat

SEQ ID NO: 539 - DNA, 25 bp, Artificial Sequence
  Probe
tttgccttaagagttccctagggag

SEQ ID NO: 540 - DNA, 25 bp, Artificial Sequence
  Probe
taccagggcttttcgttttgtgtag

SEQ ID NO: 541 - DNA, 25 bp, Artificial Sequence
  Probe
gtagcttttgcagcatggatcaaac

SEQ ID NO: 542 - DNA, 25 bp, Artificial Sequence
  Probe
ggatcaaacattggcttactgtgct

SEQ ID NO: 543 - DNA, 25 bp, Artificial Sequence
  Probe
attggcttactgtgctaatgtgtga

SEQ ID NO: 544 - DNA, 25 bp, Artificial Sequence
  Probe
atgtgtattttatctgagtttgagt

SEQ ID NO: 545 - DNA, 25 bp, Artificial Sequence
  Probe
gagtagggtgcgttgtggattttgt

SEQ ID NO: 546 - DNA, 25 bp, Artificial Sequence
  Probe
gaaagtccagttctcataaatattg

SEQ ID NO: 547 - DNA, 25 bp, Artificial Sequence
  Probe
gtttatcagcacgttcatttattat

SEQ ID NO: 548 - DNA, 25 bp, Artificial Sequence
  Probe
ggaatgttctggaagatgctgttaa

SEQ ID NO: 549 - DNA, 25 bp, Artificial Sequence
  Probe
tgagaatctggtgttactgtatttt

SEQ ID NO: 550 - DNA, 25 bp, Artificial Sequence
  Probe
gtatctgcacgagcacttagcttgt

SEQ ID NO: 551 - DNA, 25 bp, Artificial Sequence
  Probe
cacttagcttgttcagatctctgca

SEQ ID NO: 552 - DNA, 25 bp, Artificial Sequence
  Probe
aggtcattgcttgtaccaggtaatt

SEQ ID NO: 553 - DNA, 25 bp, Artificial Sequence
  Probe
gggtattttttgttgatgctttagt

SEQ ID NO: 554 - DNA, 25 bp, Artificial Sequence
  Probe
gatgctttagtgcaggcctgttctg

SEQ ID NO: 555 - DNA, 25 bp, Artificial Sequence
  Probe
gtgaaaacagcatgtgctgctgcct

SEQ ID NO: 556 - DNA, 25 bp, Artificial Sequence
  Probe
ttgtaactgcatggaaacttttcac

SEQ ID NO: 557 - DNA, 25 bp, Artificial Sequence
  Probe
ttttcacatgggtttttctccaagt

SEQ ID NO: 558 - DNA, 25 bp, Artificial Sequence
  Probe
tatagtagtggccttgttttacaaa

SEQ ID NO: 559 - DNA, 25 bp, Artificial Sequence
  Probe
aagtcccatacatttggaccatggc

SEQ ID NO: 560 - DNA, 25 bp, Artificial Sequence
  Probe
atgaactacctatggacatctatta

SEQ ID NO: 561 - DNA, 25 bp, Artificial Sequence
  Probe
ctggaggaggctgcattgaggcgtg

SEQ ID NO: 562 - DNA, 25 bp, Artificial Sequence
  Probe
gaaagccatgtaaagccatcccaga

SEQ ID NO: 563 - DNA, 25 bp, Artificial Sequence
  Probe
atttgagttctgatgccacctgtaa

SEQ ID NO: 564 - DNA, 25 bp, Artificial Sequence
  Probe
tgccacctgtaagctctgaattcac

SEQ ID NO: 565 - DNA, 25 bp, Artificial Sequence
  Probe
gaaaaacgccagtccatttctcaac

SEQ ID NO: 566 - DNA, 25 bp, Artificial Sequence
  Probe
ctcaaccttaaatttcagacagtct

SEQ ID NO: 567 - DNA, 25 bp, Artificial Sequence
  Probe
tcatctactctgtttggggtttggg

SEQ ID NO: 568 - DNA, 25 bp, Artificial Sequence
  Probe
agatacctggaaagggctctgtttc

SEQ ID NO: 569 - DNA, 25 bp, Artificial Sequence
  Probe
tcatcagtgcttttagtacttcagt

SEQ ID NO: 570 - DNA, 25 bp, Artificial Sequence
  Probe
gtagataaccagattgttgcttttt

SEQ ID NO: 571 - DNA, 25 bp, Artificial Sequence
  Probe
gactgactctaaaccaagattctgc

SEQ ID NO: 572 - DNA, 25 bp, Artificial Sequence
  Probe
gaacaccatctatagcaccctggtc

SEQ ID NO: 573 - DNA, 25 bp, Artificial Sequence
  Probe
gcaccctggtcacctgtgtgacatt

SEQ ID NO: 574 - DNA, 25 bp, Artificial Sequence
  Probe
tgtgacatttgtggccacactgcct

SEQ ID NO: 575 - DNA, 25 bp, Artificial Sequence
  Probe
gctattcaaagccagctaacccctg

SEQ ID NO: 576 - DNA, 25 bp, Artificial Sequence
  Probe
gaagcgagcctttgggggcatgtac

SEQ ID NO: 577 - DNA, 25 bp, Artificial Sequence
  Probe
gggcatgtacaacctcaatctgaag

SEQ ID NO: 578 - DNA, 25 bp, Artificial Sequence
  Probe
ggagcagtatctgtgtggctcacca

SEQ ID NO: 579 - DNA, 25 bp, Artificial Sequence
  Probe
agcaggcatgcttcgctttgtagac

SEQ ID NO: 580 - DNA, 25 bp, Artificial Sequence
  Probe
agatgtagatgtcctttcagctgcc

SEQ ID NO: 581 - DNA, 25 bp, Artificial Sequence
  Probe
agtcattccaggcaagtccattcat

SEQ ID NO: 582 - DNA, 25 bp, Artificial Sequence
  Probe
cagcagacggggctatgcccagctt

SEQ ID NO: 583 - DNA, 25 bp, Artificial Sequence
  Probe
tcctccagcagccgacaggaggccc

SEQ ID NO: 584 - DNA, 25 bp, Artificial Sequence
  Probe
aggcccgtcaagatgcaggcaggca

SEQ ID NO: 585 - DNA, 25 bp, Artificial Sequence
  Probe
aagatgcaggcaggcattgccaccc

SEQ ID NO: 586 - DNA, 25 bp, Artificial Sequence
  Probe
ggcattgccaccccagggatgaaga

SEQ ID NO: 587 - DNA, 25 bp, Artificial Sequence
  Probe
tcctgcaaaagctaaaggctgccag

SEQ ID NO: 588 - DNA, 25 bp, Artificial Sequence
  Probe
cccccaagatccgtaactacaacat

SEQ ID NO: 589 - DNA, 25 bp, Artificial Sequence
  Probe
acaacattatggactgacttcctcc

SEQ ID NO: 590 - DNA, 25 bp, Artificial Sequence
  Probe
agccggcccaggaggaaggccatgc

SEQ ID NO: 591 - DNA, 25 bp, Artificial Sequence
  Probe
ccaggaggaaggccatgcgtctctg

SEQ ID NO: 592 - DNA, 25 bp, Artificial Sequence
  Probe
gtgggcacagcgtgcagggtggagg

SEQ ID NO: 593 - DNA, 25 bp, Artificial Sequence
  Probe
tctcgcccaagtgaggcctgtgtgc

SEQ ID NO: 594 - DNA, 25 bp, Artificial Sequence
  Probe
aagggatcagaactctcgtgggcct

SEQ ID NO: 595 - DNA, 25 bp, Artificial Sequence
  Probe
cctccagtgtgtcgcaagtttttgc

SEQ ID NO: 596 - DNA, 25 bp, Artificial Sequence
  Probe
gaaaaactctccggcagtaaagcct

SEQ ID NO: 597 - DNA, 25 bp, Artificial Sequence
  Probe
gtaaagcctaaagttccacatccac

SEQ ID NO: 598 - DNA, 25 bp, Artificial Sequence
  Probe
tgatttctctcctaagggtatcccg

SEQ ID NO: 599 - DNA, 25 bp, Artificial Sequence
  Probe
cccggagtaacttctgcacatggat

SEQ ID NO: 600 - DNA, 25 bp, Artificial Sequence
  Probe
acatggatgcctgggacttcacagc

SEQ ID NO: 601 - DNA, 25 bp, Artificial Sequence
  Probe
gtccaaacacattaactgcagcata

SEQ ID NO: 602 - DNA, 25 bp, Artificial Sequence
  Probe
tagcatgttcccaatgatgacttac

SEQ ID NO: 603 - DNA, 25 bp, Artificial Sequence
  Probe
gatgacttacagcactatgcctttt

SEQ ID NO: 604 - DNA, 25 bp, Artificial Sequence
  Probe
gcaactacaatgactgtactctcta

SEQ ID NO: 605 - DNA, 25 bp, Artificial Sequence
  Probe
gaattcggcggcatgtgtggtgtac

SEQ ID NO: 606 - DNA, 25 bp, Artificial Sequence
  Probe
gtgtacgaggacatgtcgcacagcc

SEQ ID NO: 607 - DNA, 25 bp, Artificial Sequence
  Probe
caaccagtaccagtgacccagtggg

SEQ ID NO: 608 - DNA, 25 bp, Artificial Sequence
  Probe
tcccacggctgcagcagagtttgaa

SEQ ID NO: 609 - DNA, 25 bp, Artificial Sequence
  Probe
agcagagtttgaagggcccagccgt

SEQ ID NO: 610 - DNA, 25 bp, Artificial Sequence
  Probe
agctccaagcagacacacaggcagt

SEQ ID NO: 611 - DNA, 25 bp, Artificial Sequence
  Probe
cccacggtgcttctcagtggacaat

SEQ ID NO: 612 - DNA, 25 bp, Artificial Sequence
  Probe
tcagtggacaatgatgcctcctccg

SEQ ID NO: 613 - DNA, 25 bp, Artificial Sequence
  Probe
gaggaagcctgactgtcctttggct

SEQ ID NO: 614 - DNA, 25 bp, Artificial Sequence
  Probe
gagggcttttctgtgggatgggcct

SEQ ID NO: 615 - DNA, 25 bp, Artificial Sequence
  Probe
ccacccagccgtaccagaaataaag

SEQ ID NO: 616 - DNA, 25 bp, Artificial Sequence
  Probe
ccaggccatcacggaggtcaatgtc

SEQ ID NO: 617 - DNA, 25 bp, Artificial Sequence
  Probe
atcacggaggtcaatgtctacggct

SEQ ID NO: 618 - DNA, 25 bp, Artificial Sequence
  Probe
cggaggtcaatgtctacggctccgg

SEQ ID NO: 619 - DNA, 25 bp, Artificial Sequence
  Probe
gaggaacagtcccaaggatggcaca

SEQ ID NO: 620 - DNA, 25 bp, Artificial Sequence
  Probe
cgtgtgtgctggcgaggacacagat

SEQ ID NO: 621 - DNA, 25 bp, Artificial Sequence
  Probe
gtgctggcgaggacacagataaaga

SEQ ID NO: 622 - DNA, 25 bp, Artificial Sequence
  Probe
gggataagaattcggcggcatgtgt

SEQ ID NO: 623 - DNA, 25 bp, Artificial Sequence
  Probe
gaattcggcggcatgtgtggtgtac

SEQ ID NO: 624 - DNA, 25 bp, Artificial Sequence
  Probe
ggcggcatgtgtggtgtacgaggac

SEQ ID NO: 625 - DNA, 25 bp, Artificial Sequence
  Probe
gtggtgtacgaggacatgtcgcaca

SEQ ID NO: 626 - DNA, 25 bp, Artificial Sequence
  Probe
tgtacgaggacatgtcgcacagccg

SEQ ID NO: 627 - DNA, 25 bp, Artificial Sequence
  Probe
ggcctggaactcgccaagaagcagc

SEQ ID NO: 628 - DNA, 25 bp, Artificial Sequence
  Probe
tgctctctcatggagggcactccag

SEQ ID NO: 629 - DNA, 25 bp, Artificial Sequence
  Probe
ggcactccagatgtcatgctgttct

SEQ ID NO: 630 - DNA, 25 bp, Artificial Sequence
  Probe
tgctcagcaaacacctgctcaagtc

SEQ ID NO: 631 - DNA, 25 bp, Artificial Sequence
  Probe
gctcaagtcctttgtgtgttcgaca

SEQ ID NO: 632 - DNA, 25 bp, Artificial Sequence
  Probe
gacaaagaaccggcgctgcaaactg

SEQ ID NO: 633 - DNA, 25 bp, Artificial Sequence
  Probe
gcatggcacagtgaccgtggtgggc

SEQ ID NO: 634 - DNA, 25 bp, Artificial Sequence
  Probe
ccccagagaccgacagctcggacag

SEQ ID NO: 635 - DNA, 25 bp, Artificial Sequence
  Probe
gatgctgcacaaccattttgacctc

SEQ ID NO: 636 - DNA, 25 bp, Artificial Sequence
  Probe
agtttctggacgcacttatttccct

SEQ ID NO: 637 - DNA, 25 bp, Artificial Sequence
  Probe
tttccctcctgtcctaggaatttga

SEQ ID NO: 638 - DNA, 25 bp, Artificial Sequence
  Probe
gcacggacacctatgaagaccagca

SEQ ID NO: 639 - DNA, 25 bp, Artificial Sequence
  Probe
ccccaagcccactggtgaaacagct

SEQ ID NO: 640 - DNA, 25 bp, Artificial Sequence
  Probe
ccagaggcacctttatcttctgaat

SEQ ID NO: 641 - DNA, 25 bp, Artificial Sequence
  Probe
ctgaattggacttgcctctgggtac

SEQ ID NO: 642 - DNA, 25 bp, Artificial Sequence
  Probe
ccagatcttcaggttctatgcgcaa

SEQ ID NO: 643 - DNA, 25 bp, Artificial Sequence
  Probe
gcaaggtactagggagatcccccct

SEQ ID NO: 644 - DNA, 25 bp, Artificial Sequence
  Probe
tcctgcaggatgacaactcccctgg

SEQ ID NO: 645 - DNA, 25 bp, Artificial Sequence
  Probe
tacgacagggtaagcggccttcacc

SEQ ID NO: 646 - DNA, 25 bp, Artificial Sequence
  Probe
ggagccattcttggaactggacgac

SEQ ID NO: 647 - DNA, 25 bp, Artificial Sequence
  Probe
gagcaaggccaggaccatgacaagg

SEQ ID NO: 648 - DNA, 25 bp, Artificial Sequence
  Probe
aaaatcagcactttcccttggtgga

SEQ ID NO: 649 - DNA, 25 bp, Artificial Sequence
  Probe
aatggcttgttttcttagactcctc

SEQ ID NO: 650 - DNA, 25 bp, Artificial Sequence
  Probe
cctcctcagctaccaaactgggact

SEQ ID NO: 651 - DNA, 25 bp, Artificial Sequence
  Probe
gctaccaaactgggactcacagctt

SEQ ID NO: 652 - DNA, 25 bp, Artificial Sequence
  Probe
ggactcacagctttattgggctttc

SEQ ID NO: 653 - DNA, 25 bp, Artificial Sequence
  Probe
ttattgggctttctttgtgtcttgt

SEQ ID NO: 654 - DNA, 25 bp, Artificial Sequence
  Probe
ttctttgtgtcttgtgtgtttcttt

SEQ ID NO: 655 - DNA, 25 bp, Artificial Sequence
  Probe
cctgcatggccccagcaatgcagtc

SEQ ID NO: 656 - DNA, 25 bp, Artificial Sequence
  Probe
acccagggcctggtgatatctgtgt

SEQ ID NO: 657 - DNA, 25 bp, Artificial Sequence
  Probe
cctggtgatatctgtgtcctctcac

SEQ ID NO: 658 - DNA, 25 bp, Artificial Sequence
  Probe
cttctttcccagggatactgaggaa

SEQ ID NO: 659 - DNA, 25 bp, Artificial Sequence
  Probe
gggatactgaggaatggcttgtttt

SEQ ID NO: 660 - DNA, 25 bp, Artificial Sequence
  Probe
ttgggatgggttcgtgtccagtccc

SEQ ID NO: 661 - DNA, 25 bp, Artificial Sequence
  Probe
tccagtcccgggggtctgatatggc

SEQ ID NO: 662 - DNA, 25 bp, Artificial Sequence
  Probe
ctgatatggccatcacaggctgggt

SEQ ID NO: 663 - DNA, 25 bp, Artificial Sequence
  Probe
acaggctgggtgttcccagcagccc

SEQ ID NO: 664 - DNA, 25 bp, Artificial Sequence
  Probe
gccgactgcttttcatctgagtcac

SEQ ID NO: 665 - DNA, 25 bp, Artificial Sequence
  Probe
agtcaccatttactccaagcatgta

SEQ ID NO: 666 - DNA, 25 bp, Artificial Sequence
  Probe
aagcatgtattccagacttgtcact

SEQ ID NO: 667 - DNA, 25 bp, Artificial Sequence
  Probe
cactgactttccttctggagcaggt

SEQ ID NO: 668 - DNA, 25 bp, Artificial Sequence
  Probe
gtttctcatttgtgaggccagcctc

SEQ ID NO: 669 - DNA, 25 bp, Artificial Sequence
  Probe
tcccctcagcaattcctgcaaaggg

SEQ ID NO: 670 - DNA, 25 bp, Artificial Sequence
  Probe
gctggatgctaacttgatactaacc

SEQ ID NO: 671 - DNA, 25 bp, Artificial Sequence
  Probe
ctccctgtgaagagagagttaatat

SEQ ID NO: 672 - DNA, 25 bp, Artificial Sequence
  Probe
tcccagcagccctggcttgggggct

SEQ ID NO: 673 - DNA, 25 bp, Artificial Sequence
  Probe
tggcttgggggcttgacgcccttcc

SEQ ID NO: 674 - DNA, 25 bp, Artificial Sequence
  Probe
ctctcctcagttttgccgactgctt

SEQ ID NO: 675 - DNA, 25 bp, Artificial Sequence
  Probe
ccaagcatgtattccagacttgtca

SEQ ID NO: 676 - DNA, 25 bp, Artificial Sequence
  Probe
atgtattccagacttgtcactgact

SEQ ID NO: 677 - DNA, 25 bp, Artificial Sequence
  Probe
cttgtcactgactttccttctggag

SEQ ID NO: 678 - DNA, 25 bp, Artificial Sequence
  Probe
tttccttctggagcaggtggctaga

SEQ ID NO: 679 - DNA, 25 bp, Artificial Sequence
  Probe
gaaaggctcctgtttctcatttgtg

SEQ ID NO: 680 - DNA, 25 bp, Artificial Sequence
  Probe
ttctcatttgtgaggccagcctctg

SEQ ID NO: 681 - DNA, 25 bp, Artificial Sequence
  Probe
ctctggcttttctgccgtggattct

SEQ ID NO: 682 - DNA, 25 bp, Artificial Sequence
  Probe
ttaactggtttttactactgatgac

SEQ ID NO: 683 - DNA, 25 bp, Artificial Sequence
  Probe
taactggtttttactactgatgact

SEQ ID NO: 684 - DNA, 25 bp, Artificial Sequence
  Probe
ccatcagattgtacagtttggttgt

SEQ ID NO: 685 - DNA, 25 bp, Artificial Sequence
  Probe
tactactgaataaactagttctgtg

SEQ ID NO: 686 - DNA, 25 bp, Artificial Sequence
  Probe
actgaataaactagttctgtgcggg

SEQ ID NO: 687 - DNA, 25 bp, Artificial Sequence
  Probe
agaccactttgagcagttgcctgga

SEQ ID NO: 688 - DNA, 25 bp, Artificial Sequence
  Probe
gaaggctgggcatttccatcatata

SEQ ID NO: 689 - DNA, 25 bp, Artificial Sequence
  Probe
catttccatcatatagacctctgcc

SEQ ID NO: 690 - DNA, 25 bp, Artificial Sequence
  Probe
cccttcagagtagcctcaccattag

SEQ ID NO: 691 - DNA, 25 bp, Artificial Sequence
  Probe
cctcaccattagtggcagcatcatg

SEQ ID NO: 692 - DNA, 25 bp, Artificial Sequence
  Probe
gagtggactgtgcttgtcaacggat

SEQ ID NO: 693 - DNA, 25 bp, Artificial Sequence
  Probe
gtcaacggatgtgtagcttttcaga

SEQ ID NO: 694 - DNA, 25 bp, Artificial Sequence
  Probe
gctttgatgttctggttacttctag

SEQ ID NO: 695 - DNA, 25 bp, Artificial Sequence
  Probe
ttacttctagtaaattcctgtcaaa

SEQ ID NO: 696 - DNA, 25 bp, Artificial Sequence
  Probe
tcaacaccgttccaaaggcctgaaa

SEQ ID NO: 697 - DNA, 25 bp, Artificial Sequence
  Probe
gagactccaaggttgactttagttt

SEQ ID NO: 698 - DNA, 25 bp, Artificial Sequence
  Probe
cccttcagccgcctggcaagagaaa

SEQ ID NO: 699 - DNA, 25 bp, Artificial Sequence
  Probe
gacttcaattggcaagcccaggccc

SEQ ID NO: 700 - DNA, 25 bp, Artificial Sequence
  Probe
ggccctattggccctacaagaggca

SEQ ID NO: 701 - DNA, 25 bp, Artificial Sequence
  Probe
gttcatctctttgaggacgcctatc

SEQ ID NO: 702 - DNA, 25 bp, Artificial Sequence
  Probe
acatgcaggccgagttactctcttc

SEQ ID NO: 703 - DNA, 25 bp, Artificial Sequence
  Probe
gatccggggccttgaggagggactc

SEQ ID NO: 704 - DNA, 25 bp, Artificial Sequence
  Probe
cacccagtgtttctgtcagtctttc

SEQ ID NO: 705 - DNA, 25 bp, Artificial Sequence
  Probe
tctttcctgctcagccaggggggat

SEQ ID NO: 706 - DNA, 25 bp, Artificial Sequence
  Probe
gactctccagagccatgactagatc

SEQ ID NO: 707 - DNA, 25 bp, Artificial Sequence
  Probe
tggattctgcgatgctgtctggact

SEQ ID NO: 708 - DNA, 25 bp, Artificial Sequence
  Probe
tgtctggactttgctgtctctgaac

SEQ ID NO: 709 - DNA, 25 bp, Artificial Sequence
  Probe
ctcagtactgtcaaccagtgcccag

SEQ ID NO: 710 - DNA, 25 bp, Artificial Sequence
  Probe
ggagttcaacaatggcctgcggtcc

SEQ ID NO: 711 - DNA, 25 bp, Artificial Sequence
  Probe
agggcagagtctaaggccccagctt

SEQ ID NO: 712 - DNA, 25 bp, Artificial Sequence
  Probe
gatggggtctgggagtccagcaggc

SEQ ID NO: 713 - DNA, 25 bp, Artificial Sequence
  Probe
ttcacattccgtgcttcttgcggat

SEQ ID NO: 714 - DNA, 25 bp, Artificial Sequence
  Probe
tgacagccatggcaagcagccgatc

SEQ ID NO: 715 - DNA, 25 bp, Artificial Sequence
  Probe
cagcttggcctcagtgagacgcagg

SEQ ID NO: 716 - DNA, 25 bp, Artificial Sequence
  Probe
cccagcttccacttcaggaggaaac

SEQ ID NO: 717 - DNA, 25 bp, Artificial Sequence
  Probe
gtcggagccagtatcagggaagccc

SEQ ID NO: 718 - DNA, 25 bp, Artificial Sequence
  Probe
caactgggggcccatagggcactcg

SEQ ID NO: 719 - DNA, 25 bp, Artificial Sequence
  Probe
ccaggtcaccagcaagagagtccag

SEQ ID NO: 720 - DNA, 25 bp, Artificial Sequence
  Probe
aagggagaacccatcagattcgcct

SEQ ID NO: 721 - DNA, 25 bp, Artificial Sequence
  Probe
ggcctctgagtttgacaggggagcc

SEQ ID NO: 722 - DNA, 25 bp, Artificial Sequence
  Probe
ctgggagctcagactcagtccagcc

SEQ ID NO: 723 - DNA, 25 bp, Artificial Sequence
  Probe
gtgtctgggccagggatgaacggag

SEQ ID NO: 724 - DNA, 25 bp, Artificial Sequence
  Probe
gcagagtcgggtgtgcagtgtctca

SEQ ID NO: 725 - DNA, 25 bp, Artificial Sequence
  Probe
cctggaaggtgccgaccagccaggc

SEQ ID NO: 726 - DNA, 25 bp, Artificial Sequence
  Probe
gccctctgatttggccggtgggggc

SEQ ID NO: 727 - DNA, 25 bp, Artificial Sequence
  Probe
gggccatcggtgacgtgggaacgat

SEQ ID NO: 728 - DNA, 25 bp, Artificial Sequence
  Probe
ctcagagctccgtgacgttttttgg

SEQ ID NO: 729 - DNA, 25 bp, Artificial Sequence
  Probe
tgcagacatttaacacatccggggc

SEQ ID NO: 730 - DNA, 25 bp, Artificial Sequence
  Probe
gtagccaggcagaggagcgtcagac

SEQ ID NO: 731 - DNA, 25 bp, Artificial Sequence
  Probe
gtgagctgatttattctgattcatt

SEQ ID NO: 732 - DNA, 25 bp, Artificial Sequence
  Probe
gatggggccatatctactagcagag

SEQ ID NO: 733 - DNA, 25 bp, Artificial Sequence
  Probe
tgatttctgcaaacccatcttgacc

SEQ ID NO: 734 - DNA, 25 bp, Artificial Sequence
  Probe
gcaaacccatcttgaccttgagtat

SEQ ID NO: 735 - DNA, 25 bp, Artificial Sequence
  Probe
aggggtactgtactttattcctgat

SEQ ID NO: 736 - DNA, 25 bp, Artificial Sequence
  Probe
ggtttccatgtaggtgttgagctcc

SEQ ID NO: 737 - DNA, 25 bp, Artificial Sequence
  Probe
tttggacccttccattcataatccc

SEQ ID NO: 738 - DNA, 25 bp, Artificial Sequence
  Probe
ttgccctgaattttgccacttttaa

SEQ ID NO: 739 - DNA, 25 bp, Artificial Sequence
  Probe
ggctgttccttgttattccgaaagc

SEQ ID NO: 740 - DNA, 25 bp, Artificial Sequence
  Probe
actggctctcagtctagtcaggtgc

SEQ ID NO: 741 - DNA, 25 bp, Artificial Sequence
  Probe
ggtggggacctaattattaccagag

SEQ ID NO: 742 - DNA, 25 bp, Artificial Sequence
  Probe
tttcatcctgtctgtgttatgtggg

SEQ ID NO: 743 - DNA, 25 bp, Artificial Sequence
  Probe
tttgttttatcctttgtatctgaaa

SEQ ID NO: 744 - DNA, 25 bp, Artificial Sequence
  Probe
ttcagagctctgccatttcttgagt

SEQ ID NO: 745 - DNA, 25 bp, Artificial Sequence
  Probe
gtatcgggagtgtgtttagtctgtt

SEQ ID NO: 746 - DNA, 25 bp, Artificial Sequence
  Probe
taaaccgatctccaaagatttcctt

SEQ ID NO: 747 - DNA, 25 bp, Artificial Sequence
  Probe
aattttggtgctcatgtgttttggg

SEQ ID NO: 748 - DNA, 25 bp, Artificial Sequence
  Probe
aaattctcagatcaaatgtgcctta

SEQ ID NO: 749 - DNA, 25 bp, Artificial Sequence
  Probe
gacttgccattttaatacacgtcat

SEQ ID NO: 750 - DNA, 25 bp, Artificial Sequence
  Probe
tacacgtcattggagggctgcgtat

SEQ ID NO: 751 - DNA, 25 bp, Artificial Sequence
  Probe
gtaaatagcctgatgctcatttgga

SEQ ID NO: 752 - DNA, 25 bp, Artificial Sequence
  Probe
aaccattttgtctcattattcctgt

SEQ ID NO: 753 - DNA, 25 bp, Artificial Sequence
  Probe
acttgccaccagcttgtgcatttag

SEQ ID NO: 754 - DNA, 25 bp, Artificial Sequence
  Probe
ctaggccccactgctctaaggggca

SEQ ID NO: 755 - DNA, 25 bp, Artificial Sequence
  Probe
gggcatttactacagcacctattaa

SEQ ID NO: 756 - DNA, 25 bp, Artificial Sequence
  Probe
ggacgagggagaggtgcccttgctc

SEQ ID NO: 757 - DNA, 25 bp, Artificial Sequence
  Probe
tgctcgccctgtattgaccaaggag

SEQ ID NO: 758 - DNA, 25 bp, Artificial Sequence
  Probe
ggacacctggatgctgagttggatg

SEQ ID NO: 759 - DNA, 25 bp, Artificial Sequence
  Probe
gagttggatgcctacatggcgcaga

SEQ ID NO: 760 - DNA, 25 bp, Artificial Sequence
  Probe
atggcgcagacagatcccgaaacca

SEQ ID NO: 761 - DNA, 25 bp, Artificial Sequence
  Probe
aaccaatgattgaagcctgcccatc

SEQ ID NO: 762 - DNA, 25 bp, Artificial Sequence
  Probe
ccatcctcccatgagagactcttgt

SEQ ID NO: 763 - DNA, 25 bp, Artificial Sequence
  Probe
taggctgtggacttacttgccacca

SEQ ID NO: 764 - DNA, 25 bp, Artificial Sequence
  Probe
tgggggcaggaaggttatctcctcc

SEQ ID NO: 765 - DNA, 25 bp, Artificial Sequence
  Probe
tcctctccagtttggggcggaatga

SEQ ID NO: 766 - DNA, 25 bp, Artificial Sequence
  Probe
tgaggcctgctcctcttgtaaatac

SEQ ID NO: 767 - DNA, 25 bp, Artificial Sequence
  Probe
ccaagcccctgtacataacctggag

SEQ ID NO: 768 - DNA, 25 bp, Artificial Sequence
  Probe
taacctggagcgtgtgaccttcaga

SEQ ID NO: 769 - DNA, 25 bp, Artificial Sequence
  Probe
gaccttcagagcttttcactttatg

SEQ ID NO: 770 - DNA, 25 bp, Artificial Sequence
  Probe
tgcaaaatggctcctgtgagggctg

SEQ ID NO: 771 - DNA, 25 bp, Artificial Sequence
  Probe
gggaggcgcctgtggaataggggga

SEQ ID NO: 772 - DNA, 25 bp, Artificial Sequence
  Probe
cagaggggctggactcaggttagtt

SEQ ID NO: 773 - DNA, 25 bp, Artificial Sequence
  Probe
tgcactttgccacaggcacggggag

SEQ ID NO: 774 - DNA, 25 bp, Artificial Sequence
  Probe
cttactgtgccgagaagccgcaatg

SEQ ID NO: 775 - DNA, 25 bp, Artificial Sequence
  Probe
ctgagccctggtagtccaaagaccc

SEQ ID NO: 776 - DNA, 25 bp, Artificial Sequence
  Probe
ctggttcttccctgtggaaagccca

SEQ ID NO: 777 - DNA, 25 bp, Artificial Sequence
  Probe
aaagcccatcctgagacatcttgct

SEQ ID NO: 778 - DNA, 25 bp, Artificial Sequence
  Probe
ggcaatcctggatgtcctggtactg

SEQ ID NO: 779 - DNA, 25 bp, Artificial Sequence
  Probe
ctctgtgaatgtgtccactctcttc

SEQ ID NO: 780 - DNA, 25 bp, Artificial Sequence
  Probe
ttctgcccccagccatatttgggga

SEQ ID NO: 781 - DNA, 25 bp, Artificial Sequence
  Probe
agaaaatgcagccggagcctcagtc

SEQ ID NO: 782 - DNA, 25 bp, Artificial Sequence
  Probe
cataaagctggtctcactgtggcgc

SEQ ID NO: 783 - DNA, 25 bp, Artificial Sequence
  Probe
gccaccactgcagttctgctaggtc

SEQ ID NO: 784 - DNA, 25 bp, Artificial Sequence
  Probe
gaacagtttggtggtcttttctctt

SEQ ID NO: 785 - DNA, 25 bp, Artificial Sequence
  Probe
tttctcttccactgatttttctgta

SEQ ID NO: 786 - DNA, 25 bp, Artificial Sequence
  Probe
tgagccctggtagtccagagacccc

SEQ ID NO: 787 - DNA, 25 bp, Artificial Sequence
  Probe
ctggttcttccctgtggaaagccca

SEQ ID NO: 788 - DNA, 25 bp, Artificial Sequence
  Probe
aaagcccatcctgagacatcttgct

SEQ ID NO: 789 - DNA, 25 bp, Artificial Sequence
  Probe
ggcaatcctggatgtcctggtactg

SEQ ID NO: 790 - DNA, 25 bp, Artificial Sequence
  Probe
cacccgtctgtgaatgtgtccactc

SEQ ID NO: 791 - DNA, 25 bp, Artificial Sequence
  Probe
agaaaatgcagccggagcctcagtc

SEQ ID NO: 792 - DNA, 25 bp, Artificial Sequence
  Probe
gcatagagctggtctcactgtggcg

SEQ ID NO: 793 - DNA, 25 bp, Artificial Sequence
  Probe
gccaccactgcagttctgctaggtc

SEQ ID NO: 794 - DNA, 25 bp, Artificial Sequence
  Probe
gaacagtttggtggtcttttctctt

SEQ ID NO: 795 - DNA, 25 bp, Artificial Sequence
  Probe
tttctcttccactgatttttctgta

SEQ ID NO: 796 - DNA, 25 bp, Artificial Sequence
  Probe
gacattatacctttattacctcttt

SEQ ID NO: 797 - DNA, 25 bp, Artificial Sequence
  Probe
cctggccacctgaactgtatgggca

SEQ ID NO: 798 - DNA, 25 bp, Artificial Sequence
  Probe
ggaggatgacatgcagaggaactga

SEQ ID NO: 799 - DNA, 25 bp, Artificial Sequence
  Probe
gatcgacagtgactagtgacccctt

SEQ ID NO: 800 - DNA, 25 bp, Artificial Sequence
  Probe
gtgactagtgaccccttgttgaggg

SEQ ID NO: 801 - DNA, 25 bp, Artificial Sequence
  Probe
ggtaagccaggctaggggactgcac

SEQ ID NO: 802 - DNA, 25 bp, Artificial Sequence
  Probe
gggactgcacaattatacactattt

SEQ ID NO: 803 - DNA, 25 bp, Artificial Sequence
  Probe
ttattctccttggggttggtgtcag

SEQ ID NO: 804 - DNA, 25 bp, Artificial Sequence
  Probe
tgtggaaagcccatcctgagacatc

SEQ ID NO: 805 - DNA, 25 bp, Artificial Sequence
  Probe
tcctgagacatcttgctggaaccaa

SEQ ID NO: 806 - DNA, 25 bp, Artificial Sequence
  Probe
ggaaccaaggcaatcctggatgtcc

SEQ ID NO: 807 - DNA, 25 bp, Artificial Sequence
  Probe
gtaagaaaatgcagccggagcctca

SEQ ID NO: 808 - DNA, 25 bp, Artificial Sequence
  Probe
caaaggccctggtggtttccacatt

SEQ ID NO: 809 - DNA, 25 bp, Artificial Sequence
  Probe
attgctacccaatggacacactcca

SEQ ID NO: 810 - DNA, 25 bp, Artificial Sequence
  Probe
gtgggcagggaatcctggagcactt

SEQ ID NO: 811 - DNA, 25 bp, Artificial Sequence
  Probe
ggagcacttgttccgggatggtgtg

SEQ ID NO: 812 - DNA, 25 bp, Artificial Sequence
  Probe
gaagatgaaggtgtctctcagagga

SEQ ID NO: 813 - DNA, 25 bp, Artificial Sequence
  Probe
tttttggatggcaacgagctcaccc

SEQ ID NO: 814 - DNA, 25 bp, Artificial Sequence
  Probe
gtaccggggattcaccatccccgag

SEQ ID NO: 815 - DNA, 25 bp, Artificial Sequence
  Probe
ccttccggggagtgcatcggtactt

SEQ ID NO: 816 - DNA, 25 bp, Artificial Sequence
  Probe
tcggtacttgagcaatgcctacgcc

SEQ ID NO: 817 - DNA, 25 bp, Artificial Sequence
  Probe
gcccgggaagaattcgcttccacct

SEQ ID NO: 818 - DNA, 25 bp, Artificial Sequence
  Probe
gcaaaggccctcaaataagcccctc

SEQ ID NO: 819 - DNA, 25 bp, Artificial Sequence
  Probe
tgcccatcgtcaacctcaaggacga

SEQ ID NO: 820 - DNA, 25 bp, Artificial Sequence
  Probe
ttctcctttgacggcaaggacgtcc

SEQ ID NO: 821 - DNA, 25 bp, Artificial Sequence
  Probe
gacggcaaggacgtcctgaggcacc

SEQ ID NO: 822 - DNA, 25 bp, Artificial Sequence
  Probe
ctggccccagaagagcgtgtggcat

SEQ ID NO: 823 - DNA, 25 bp, Artificial Sequence
  Probe
caggctgaccgagagctactgtgag

SEQ ID NO: 824 - DNA, 25 bp, Artificial Sequence
  Probe
agagctactgtgagacgtggcggac

SEQ ID NO: 825 - DNA, 25 bp, Artificial Sequence
  Probe
tgtgagacgtggcggacggaggctc

SEQ ID NO: 826 - DNA, 25 bp, Artificial Sequence
  Probe
cctacatcgtgctctgcattgagaa

SEQ ID NO: 827 - DNA, 25 bp, Artificial Sequence
  Probe
tgagaacagcttcatgactgcctcc

SEQ ID NO: 828 - DNA, 25 bp, Artificial Sequence
  Probe
gctgccatactttcctgtatagttc

SEQ ID NO: 829 - DNA, 25 bp, Artificial Sequence
  Probe
atactttcctgtatagttcacgttt

SEQ ID NO: 830 - DNA, 25 bp, Artificial Sequence
  Probe
tggctgggacgtggctcagccagca

SEQ ID NO: 831 - DNA, 25 bp, Artificial Sequence
  Probe
tcagccagcacttgtccagctgagc

SEQ ID NO: 832 - DNA, 25 bp, Artificial Sequence
  Probe
gagcgccaggatggaacacggccac

SEQ ID NO: 833 - DNA, 25 bp, Artificial Sequence
  Probe
gcacaggacatgcggtagccagcac

SEQ ID NO: 834 - DNA, 25 bp, Artificial Sequence
  Probe
ggtagccagcacacagggcagtgag

SEQ ID NO: 835 - DNA, 25 bp, Artificial Sequence
  Probe
gctccagatgcagggcagtcattgg

SEQ ID NO: 836 - DNA, 25 bp, Artificial Sequence
  Probe
gtcattggctgtctcctaggaaacc

SEQ ID NO: 837 - DNA, 25 bp, Artificial Sequence
  Probe
aggtgcaacaaggtcctctgtcagt

SEQ ID NO: 838 - DNA, 25 bp, Artificial Sequence
  Probe
gagtcattcgttctgtggagggaca

SEQ ID NO: 839 - DNA, 25 bp, Artificial Sequence
  Probe
cctcaggactgcgacgaaaccggtg

SEQ ID NO: 840 - DNA, 25 bp, Artificial Sequence
  Probe
gggctggttctgtaattgtgtgtga

SEQ ID NO: 841 - DNA, 25 bp, Artificial Sequence
  Probe
acctcgcccggaaggagctgaagag

SEQ ID NO: 842 - DNA, 25 bp, Artificial Sequence
  Probe
gagaatgcaggacctggacgaggat

SEQ ID NO: 843 - DNA, 25 bp, Artificial Sequence
  Probe
gaagctgcaggatgcctactacatc

SEQ ID NO: 844 - DNA, 25 bp, Artificial Sequence
  Probe
gatgcctactacatcttccaggaga

SEQ ID NO: 845 - DNA, 25 bp, Artificial Sequence
  Probe
ggagatggctgacaagtgctcgccc

SEQ ID NO: 846 - DNA, 25 bp, Artificial Sequence
  Probe
tgctcaatgggcaggcggcctgcca

SEQ ID NO: 847 - DNA, 25 bp, Artificial Sequence
  Probe
tgctgcaggaggcgctagacaagga

SEQ ID NO: 848 - DNA, 25 bp, Artificial Sequence
  Probe
aggatagtggctacccagagacgct

SEQ ID NO: 849 - DNA, 25 bp, Artificial Sequence
  Probe
cccagagacgctggtcaacctcatc

SEQ ID NO: 850 - DNA, 25 bp, Artificial Sequence
  Probe
cccatcccttcatcaaggagtacca

SEQ ID NO: 851 - DNA, 25 bp, Artificial Sequence
  Probe
gcccagagctgtcaggaccatgaag

SEQ ID NO: 852 - DNA, 25 bp, Artificial Sequence
  Probe
cagcgggacctgaagatcagccggc

SEQ ID NO: 853 - DNA, 25 bp, Artificial Sequence
  Probe
cgcaacgtgttgtctgacagccggc

SEQ ID NO: 854 - DNA, 25 bp, Artificial Sequence
  Probe
ccctgagggcgctggtcaaggagca

SEQ ID NO: 855 - DNA, 25 bp, Artificial Sequence
  Probe
tcaaggagcagggcgaccgcatctg

SEQ ID NO: 856 - DNA, 25 bp, Artificial Sequence
  Probe
cagctgggccgcatggagaacgggg

SEQ ID NO: 857 - DNA, 25 bp, Artificial Sequence
  Probe
tgggccgcatggagaacggggatgc

SEQ ID NO: 858 - DNA, 25 bp, Artificial Sequence
  Probe
ggagaacggggatgcgtagggccac

SEQ ID NO: 859 - DNA, 25 bp, Artificial Sequence
  Probe
ccagagcctctgaggcagcgcaggg

SEQ ID NO: 860 - DNA, 25 bp, Artificial Sequence
  Probe
cctccccagaggaggcgggagggtg

SEQ ID NO: 861 - DNA, 25 bp, Artificial Sequence
  Probe
gagggtgggctctatattttcattc

SEQ ID NO: 862 - DNA, 25 bp, Artificial Sequence
  Probe
gtgggctctatattttcattccaaa

SEQ ID NO: 863 - DNA, 25 bp, Artificial Sequence
  Probe
atgaccgacctgcctgcaggtgaca

SEQ ID NO: 864 - DNA, 25 bp, Artificial Sequence
  Probe
ggtgacagattgactgggatcccct

SEQ ID NO: 865 - DNA, 25 bp, Artificial Sequence
  Probe
tgagtgggagcccatggtgctgtct

SEQ ID NO: 866 - DNA, 25 bp, Artificial Sequence
  Probe
gggactgtcccagacggatatctac

SEQ ID NO: 867 - DNA, 25 bp, Artificial Sequence
  Probe
ggatatctaccgctgtaaggccaac

SEQ ID NO: 868 - DNA, 25 bp, Artificial Sequence
  Probe
cagcaaccgctggggagtgtgtccc

SEQ ID NO: 869 - DNA, 25 bp, Artificial Sequence
  Probe
gtgtccctgagtcatgtgggcttga

SEQ ID NO: 870 - DNA, 25 bp, Artificial Sequence
  Probe
tgggcttgaatcctgactttcactc

SEQ ID NO: 871 - DNA, 25 bp, Artificial Sequence
  Probe
cagggtttccactagacattacttg

SEQ ID NO: 872 - DNA, 25 bp, Artificial Sequence
  Probe
cagattactcagcagatctcccatg

SEQ ID NO: 873 - DNA, 25 bp, Artificial Sequence
  Probe
gatctcccatgttggctcaacaatt

SEQ ID NO: 874 - DNA, 25 bp, Artificial Sequence
  Probe
ttcagtccattccagagtcgaccag

SEQ ID NO: 875 - DNA, 25 bp, Artificial Sequence
  Probe
gggtctgaggattaccagcctcacg

SEQ ID NO: 876 - DNA, 25 bp, Artificial Sequence
  Probe
gacttccagaaatatcctgacccac

SEQ ID NO: 877 - DNA, 25 bp, Artificial Sequence
  Probe
gaagccaagacccagtgggcgcatc

SEQ ID NO: 878 - DNA, 25 bp, Artificial Sequence
  Probe
tgtgagctggaacagaccttcctgg

SEQ ID NO: 879 - DNA, 25 bp, Artificial Sequence
  Probe
gggattcctacttaggtgtctgccc

SEQ ID NO: 880 - DNA, 25 bp, Artificial Sequence
  Probe
ccctcaggggtccaaatcacttcag

SEQ ID NO: 881 - DNA, 25 bp, Artificial Sequence
  Probe
acaccccaagagatgtcctttagtc

SEQ ID NO: 882 - DNA, 25 bp, Artificial Sequence
  Probe
ctttagtctctgcctgaggcctagt

SEQ ID NO: 883 - DNA, 25 bp, Artificial Sequence
  Probe
tgaggcctagtctgcatttgtttgc

SEQ ID NO: 884 - DNA, 25 bp, Artificial Sequence
  Probe
gagggtacctcaaatacttctgtta

SEQ ID NO: 885 - DNA, 25 bp, Artificial Sequence
  Probe
ctaaacatgctgagtgacccctgtg

SEQ ID NO: 886 - DNA, 25 bp, Artificial Sequence
  Probe
gctgtggaggagtcattccgcagtg

SEQ ID NO: 887 - DNA, 25 bp, Artificial Sequence
  Probe
cagtgaccggctccaatgagggcac

SEQ ID NO: 888 - DNA, 25 bp, Artificial Sequence
  Probe
caatgagggcacctcatcaccatcc

SEQ ID NO: 889 - DNA, 25 bp, Artificial Sequence
  Probe
tccccctggcaggtagagactctac

SEQ ID NO: 890 - DNA, 25 bp, Artificial Sequence
  Probe
ccagatcctctttctagcatgaatg

SEQ ID NO: 891 - DNA, 25 bp, Artificial Sequence
  Probe
ggcccctgaattctgcgcaagggat

SEQ ID NO: 892 - DNA, 25 bp, Artificial Sequence
  Probe
gatgggcctgggggaactcaaggga

SEQ ID NO: 893 - DNA, 25 bp, Artificial Sequence
  Probe
agcacttgtaactttgaaccgtctg

SEQ ID NO: 894 - DNA, 25 bp, Artificial Sequence
  Probe
gaaccgtctgtctggaggtcagagc

SEQ ID NO: 895 - DNA, 25 bp, Artificial Sequence
  Probe
ctcttccccttgcagtggaggagag

SEQ ID NO: 896 - DNA, 25 bp, Artificial Sequence
  Probe
gccactcgccttcttagagttttat

SEQ ID NO: 897 - DNA, 25 bp, Artificial Sequence
  Probe
cactcgccttcttagagttttattc

SEQ ID NO: 898 - DNA, 25 bp, Artificial Sequence
  Probe
tgagattttttttccgtgtgtttat

SEQ ID NO: 899 - DNA, 25 bp, Artificial Sequence
  Probe
ggagaaagaaagtacccagcaaatg

SEQ ID NO: 900 - DNA, 25 bp, Artificial Sequence
  Probe
tgtttgcgcttgaccatgttgcact

SEQ ID NO: 901 - DNA, 25 bp, Artificial Sequence
  Probe
gcttgaccatgttgcactgtttgca

SEQ ID NO: 902 - DNA, 25 bp, Artificial Sequence
  Probe
catgttgcactgtttgcatgcgccc

SEQ ID NO: 903 - DNA, 25 bp, Artificial Sequence
  Probe
cccgaggcagacgtctgtcaggggc

SEQ ID NO: 904 - DNA, 25 bp, Artificial Sequence
  Probe
cagacgtctgtcaggggcttggatt

SEQ ID NO: 905 - DNA, 25 bp, Artificial Sequence
  Probe
cgtctgtcaggggcttggatttcgt

SEQ ID NO: 906 - DNA, 25 bp, Artificial Sequence
  Probe
tcaggggcttggatttcgtgtgccg

SEQ ID NO: 907 - DNA, 25 bp, Artificial Sequence
  Probe
gaacctgagagggcagcagcggacc

SEQ ID NO: 908 - DNA, 25 bp, Artificial Sequence
  Probe
agcggacccggcttctgaataaatt

SEQ ID NO: 909 - DNA, 25 bp, Artificial Sequence
  Probe
gggtgcaatgcaggtggcggacaag

SEQ ID NO: 910 - DNA, 25 bp, Artificial Sequence
  Probe
gaaaaacacgacatggtccggcgag

SEQ ID NO: 911 - DNA, 25 bp, Artificial Sequence
  Probe
ggtccggcgaggagagatcatcgac

SEQ ID NO: 912 - DNA, 25 bp, Artificial Sequence
  Probe
cgaggaggagttctacctccggcgc

SEQ ID NO: 913 - DNA, 25 bp, Artificial Sequence
  Probe
tcccccagattcgccagagggttca

SEQ ID NO: 914 - DNA, 25 bp, Artificial Sequence
  Probe
agagggttcaccagatcctaaacat

SEQ ID NO: 915 - DNA, 25 bp, Artificial Sequence
  Probe
ggaagctccatcaaaattgtcaggc

SEQ ID NO: 916 - DNA, 25 bp, Artificial Sequence
  Probe
agagaacatcggggacggccggagc

SEQ ID NO: 917 - DNA, 25 bp, Artificial Sequence
  Probe
gagcaaaagcgcatcctgggcttgc

SEQ ID NO: 918 - DNA, 25 bp, Artificial Sequence
  Probe
gctccgggaacagtgcatgtgcatg

SEQ ID NO: 919 - DNA, 25 bp, Artificial Sequence
  Probe
gtgcatgcataccacaagacatttc

SEQ ID NO: 920 - DNA, 25 bp, Artificial Sequence
  Probe
tagtttgttaaagcctgttccatag

SEQ ID NO: 921 - DNA, 25 bp, Artificial Sequence
  Probe
atgacagtgggcagcacctttctag

SEQ ID NO: 922 - DNA, 25 bp, Artificial Sequence
  Probe
gcagcacctttctagcgtgagctgt

SEQ ID NO: 923 - DNA, 25 bp, Artificial Sequence
  Probe
gtgctttatactgaacgtggttgat

SEQ ID NO: 924 - DNA, 25 bp, Artificial Sequence
  Probe
aggagagacgaggcattcgggccgg

SEQ ID NO: 925 - DNA, 25 bp, Artificial Sequence
  Probe
ggcgtaagggttatcgttaagcaca

SEQ ID NO: 926 - DNA, 25 bp, Artificial Sequence
  Probe
tacacactgtgtgggggacggcttc

SEQ ID NO: 927 - DNA, 25 bp, Artificial Sequence
  Probe
gtgactctaggcttcaggttgcatt

SEQ ID NO: 928 - DNA, 25 bp, Artificial Sequence
  Probe
tgcattggggttcctctgtacagca

SEQ ID NO: 929 - DNA, 25 bp, Artificial Sequence
  Probe
gaagctatttcatttgctgttcatc

SEQ ID NO: 930 - DNA, 25 bp, Artificial Sequence
  Probe
tgtactgtatctattcttctgacca

SEQ ID NO: 931 - DNA, 25 bp, Artificial Sequence
  Probe
tattcttctgaccatctagtgactc

SEQ ID NO: 932 - DNA, 25 bp, Artificial Sequence
  Probe
gtgactcaggatattaggcccagtt

SEQ ID NO: 933 - DNA, 25 bp, Artificial Sequence
  Probe
tttccacacattcacgcatacttgg

SEQ ID NO: 934 - DNA, 25 bp, Artificial Sequence
  Probe
atacttggatatcaaccctctctac

SEQ ID NO: 935 - DNA, 25 bp, Artificial Sequence
  Probe
atccccctcagaacacgataaacca

SEQ ID NO: 936 - DNA, 25 bp, Artificial Sequence
  Probe
accatggccaattcagtttcacttt

SEQ ID NO: 937 - DNA, 25 bp, Artificial Sequence
  Probe
aaaatgtaaactgctcgccttattc

SEQ ID NO: 938 - DNA, 25 bp, Artificial Sequence
  Probe
gaacatgggccgcgggtaaactagc

SEQ ID NO: 939 - DNA, 25 bp, Artificial Sequence
  Probe
taaactagctttgctctttagatgc

SEQ ID NO: 940 - DNA, 25 bp, Artificial Sequence
  Probe
catcacctcttgtctaaactgctac

SEQ ID NO: 941 - DNA, 25 bp, Artificial Sequence
  Probe
cttctgacttccatgctgcaatgag

SEQ ID NO: 942 - DNA, 25 bp, Artificial Sequence
  Probe
aacatcgaactttccttagcttctt

SEQ ID NO: 943 - DNA, 25 bp, Artificial Sequence
  Probe
cttcagtggcttccaactgcttttg

SEQ ID NO: 944 - DNA, 25 bp, Artificial Sequence
  Probe
ataaatcaggctcatctcgcaacac

SEQ ID NO: 945 - DNA, 25 bp, Artificial Sequence
  Probe
gttctctatggcctagacacactgg

SEQ ID NO: 946 - DNA, 25 bp, Artificial Sequence
  Probe
agttcattacatgtcttgcctcaga

SEQ ID NO: 947 - DNA, 25 bp, Artificial Sequence
  Probe
ctttccacctagctgatcctaaatg

SEQ ID NO: 948 - DNA, 25 bp, Artificial Sequence
  Probe
taaatgttccttcctcagggaggtc

SEQ ID NO: 949 - DNA, 25 bp, Artificial Sequence
  Probe
gctggctgcgctgctagattgtaag

SEQ ID NO: 950 - DNA, 25 bp, Artificial Sequence
  Probe
ttcacatcttgctcactgctatatt

SEQ ID NO: 951 - DNA, 25 bp, Artificial Sequence
  Probe
gggattaccaaaggctggagcgatt

SEQ ID NO: 952 - DNA, 25 bp, Artificial Sequence
  Probe
ttaagctatgcactagccttgccct

SEQ ID NO: 953 - DNA, 25 bp, Artificial Sequence
  Probe
ccctcttaggttgcattctctttag

SEQ ID NO: 954 - DNA, 25 bp, Artificial Sequence
  Probe
ttctctttaggccactggttctcaa

SEQ ID NO: 955 - DNA, 25 bp, Artificial Sequence
  Probe
ggccactggttctcaaacattaggg

SEQ ID NO: 956 - DNA, 25 bp, Artificial Sequence
  Probe
aacattagggtgcactgtaaccatt

SEQ ID NO: 957 - DNA, 25 bp, Artificial Sequence
  Probe
tgaaaagtgcagaaacctgagcctc

SEQ ID NO: 958 - DNA, 25 bp, Artificial Sequence
  Probe
gtatttttcatagcaacctcaagta

SEQ ID NO: 959 - DNA, 25 bp, Artificial Sequence
  Probe
agggtctcgggattgcaggttgaaa

SEQ ID NO: 960 - DNA, 25 bp, Artificial Sequence
  Probe
gaaaaacacaaccttaatcagcagt

SEQ ID NO: 961 - DNA, 25 bp, Artificial Sequence
  Probe
gcagtaaattcttctctactcggcc

SEQ ID NO: 962 - DNA, 25 bp, Artificial Sequence
  Probe
aaagttctctccaacacattgtcag

SEQ ID NO: 963 - DNA, 25 bp, Artificial Sequence
  Probe
cattgtcagattgcctcagggtgcc

SEQ ID NO: 964 - DNA, 25 bp, Artificial Sequence
  Probe
gtggacgggtttctttgtatcagcc

SEQ ID NO: 965 - DNA, 25 bp, Artificial Sequence
  Probe
ggaactcttctggtgtttgacttag

SEQ ID NO: 966 - DNA, 25 bp, Artificial Sequence
  Probe
gatcctggttcttatgggtccatga

SEQ ID NO: 967 - DNA, 25 bp, Artificial Sequence
  Probe
ggtcatccagcatcatacaggcatc

SEQ ID NO: 968 - DNA, 25 bp, Artificial Sequence
  Probe
acaggcatctccaagttagactcta

SEQ ID NO: 969 - DNA, 25 bp, Artificial Sequence
  Probe
agcatcatcttttgcagcattcctc

SEQ ID NO: 970 - DNA, 25 bp, Artificial Sequence
  Probe
tgatctgtgccactgaactccagtt

SEQ ID NO: 971 - DNA, 25 bp, Artificial Sequence
  Probe
cagttcttctggtcattttgcatgg

SEQ ID NO: 972 - DNA, 25 bp, Artificial Sequence
  Probe
ttttgcatggtagctcttgtcacgt

SEQ ID NO: 973 - DNA, 25 bp, Artificial Sequence
  Probe
gaaactcccagttaaagcctaggct

SEQ ID NO: 974 - DNA, 25 bp, Artificial Sequence
  Probe
agcctaggctagcaattttttttag

SEQ ID NO: 975 - DNA, 25 bp, Artificial Sequence
  Probe
actaaggatgctgctagactaagga

SEQ ID NO: 976 - DNA, 25 bp, Artificial Sequence
  Probe
cagaggggtctatcatgcttttaag

SEQ ID NO: 977 - DNA, 25 bp, Artificial Sequence
  Probe
gagtattttggatgccattaaactt

SEQ ID NO: 978 - DNA, 25 bp, Artificial Sequence
  Probe
ggcttaaattatcacgtattgttac

SEQ ID NO: 979 - DNA, 25 bp, Artificial Sequence
  Probe
aatcatgtcctaagaatttctccca

SEQ ID NO: 980 - DNA, 25 bp, Artificial Sequence
  Probe
gaatttctcccattcaaatgataat

SEQ ID NO: 981 - DNA, 25 bp, Artificial Sequence
  Probe
tcaaagttaccattacgctgctctc

SEQ ID NO: 982 - DNA, 25 bp, Artificial Sequence
  Probe
gctctcttgtaaatgaactagggat

SEQ ID NO: 983 - DNA, 25 bp, Artificial Sequence
  Probe
atctcacattcacctcctatatgta

SEQ ID NO: 984 - DNA, 25 bp, Artificial Sequence
  Probe
tttctccctcatttagatttcatgg

SEQ ID NO: 985 - DNA, 25 bp, Artificial Sequence
  Probe
ggaaatttggagtattccagacaat

SEQ ID NO: 986 - DNA, 25 bp, Artificial Sequence
  Probe
ttccagacaatatactagataccca

SEQ ID NO: 987 - DNA, 25 bp, Artificial Sequence
  Probe
tatactagatacccagaaacttttc

SEQ ID NO: 988 - DNA, 25 bp, Artificial Sequence
  Probe
agaaacttttctcagtaggttctga

SEQ ID NO: 989 - DNA, 25 bp, Artificial Sequence
  Probe
taggttctgaggtgttttaagttct

SEQ ID NO: 990 - DNA, 25 bp, Artificial Sequence
  Probe
tttaagttcttatgctagactgtaa

SEQ ID NO: 991 - DNA, 25 bp, Artificial Sequence
  Probe
ttatttattcttgtatcctcagtgc

SEQ ID NO: 992 - DNA, 25 bp, Artificial Sequence
  Probe
ctggtacaggacttgacacagagta

SEQ ID NO: 993 - DNA, 25 bp, Artificial Sequence
  Probe
ggacttgacacagagtagttgttca

SEQ ID NO: 994 - DNA, 25 bp, Artificial Sequence
  Probe
atctggtccaaagtctttaaaatag

SEQ ID NO: 995 - DNA, 25 bp, Artificial Sequence
  Probe
gtgtgagatcaaactggaggcggcc

SEQ ID NO: 996 - DNA, 25 bp, Artificial Sequence
  Probe
tcaaactggaggcggcccactttga

SEQ ID NO: 997 - DNA, 25 bp, Artificial Sequence
  Probe
ggcggcccactttgacgaaaagaag

SEQ ID NO: 998 - DNA, 25 bp, Artificial Sequence
  Probe
ggagatcaacaaacggaagcagctg

SEQ ID NO: 999 - DNA, 25 bp, Artificial Sequence
  Probe
tggaggccaagcgcaaggctgagct

SEQ ID NO: 1000 - DNA, 25 bp, Artificial Sequence
  Probe
agcagaagaaccggcgcttcaagga

SEQ ID NO: 1001 - DNA, 25 bp, Artificial Sequence
  Probe
ggaggagacgctgaagcgacagaag

SEQ ID NO: 1002 - DNA, 25 bp, Artificial Sequence
  Probe
gactcgtccatggagctgagggtcg

SEQ ID NO: 1003 - DNA, 25 bp, Artificial Sequence
  Probe
gtccatggagctgagggtcggagga

SEQ ID NO: 1004 - DNA, 25 bp, Artificial Sequence
  Probe
gggtgccgcatacaggaggtgctta

SEQ ID NO: 1005 - DNA, 25 bp, Artificial Sequence
  Probe
gccgcatacaggaggtgcttaataa

SEQ ID NO: 1006 - DNA, 25 bp, Artificial Sequence
  Probe
ccactttgacgaaaagaaggagatc

SEQ ID NO: 1007 - DNA, 25 bp, Artificial Sequence
  Probe
ggaaggaccctgacctggaggccaa

SEQ ID NO: 1008 - DNA, 25 bp, Artificial Sequence
  Probe
aaggaccctgacctggaggccaagc

SEQ ID NO: 1009 - DNA, 25 bp, Artificial Sequence
  Probe
agaaccggcgcttcaaggagaaggt

SEQ ID NO: 1010 - DNA, 25 bp, Artificial Sequence
  Probe
acgctgaagcgacagaaggctggca

SEQ ID NO: 1011 - DNA, 25 bp, Artificial Sequence
  Probe
tgcccagtccttgactcgtccatgg

SEQ ID NO: 1012 - DNA, 25 bp, Artificial Sequence
  Probe
cccagtccttgactcgtccatggag

SEQ ID NO: 1013 - DNA, 25 bp, Artificial Sequence
  Probe
ctgagggtcggaggaaccttccttg

SEQ ID NO: 1014 - DNA, 25 bp, Artificial Sequence
  Probe
agtgccccacagcagaacccgtggg

SEQ ID NO: 1015 - DNA, 25 bp, Artificial Sequence
  Probe
cagcagaacccgtgggcgctcgtgt

SEQ ID NO: 1016 - DNA, 25 bp, Artificial Sequence
  Probe
ttccctgagccctggccaagattca

SEQ ID NO: 1017 - DNA, 25 bp, Artificial Sequence
  Probe
gccctggccaagattcaggctgcag

SEQ ID NO: 1018 - DNA, 25 bp, Artificial Sequence
  Probe
caagattcaggctgcaggggaagaa

SEQ ID NO: 1019 - DNA, 25 bp, Artificial Sequence
  Probe
acatgaccgggaggttgtgacccca

SEQ ID NO: 1020 - DNA, 25 bp, Artificial Sequence
  Probe
catgaccgggaggttgtgaccccaa

SEQ ID NO: 1021 - DNA, 25 bp, Artificial Sequence
  Probe
ggtgccgcatacaggaggtgcttaa

SEQ ID NO: 1022 - DNA, 25 bp, Artificial Sequence
  Probe
cactcctgggtgaaggtgctctggg

SEQ ID NO: 1023 - DNA, 25 bp, Artificial Sequence
  Probe
gaaggtgctctgggattttgtgttt

SEQ ID NO: 1024 - DNA, 25 bp, Artificial Sequence
  Probe
ttttgtgtttgaggactccctgggg

SEQ ID NO: 1025 - DNA, 25 bp, Artificial Sequence
  Probe
ggccctatgccagggtgaagcgggt

SEQ ID NO: 1026 - DNA, 25 bp, Artificial Sequence
  Probe
gtgaagcgggtgtacaggctggcaa

SEQ ID NO: 1027 - DNA, 25 bp, Artificial Sequence
  Probe
gtgtacaggctggcaaaagatggtc

SEQ ID NO: 1028 - DNA, 25 bp, Artificial Sequence
  Probe
caaaagatggtctgtgagcccgggc

SEQ ID NO: 1029 - DNA, 25 bp, Artificial Sequence
  Probe
tgagaagctacatttccttcctgtg

SEQ ID NO: 1030 - DNA, 25 bp, Artificial Sequence
  Probe
gccgcacacgcagcgggcaaggaga

SEQ ID NO: 1031 - DNA, 25 bp, Artificial Sequence
  Probe
gcgggcaaggagatactgggtgcgg

SEQ ID NO: 1032 - DNA, 25 bp, Artificial Sequence
  Probe
ggagatactgggtgcggaagatcgc

SEQ ID NO: 1033 - DNA, 25 bp, Artificial Sequence
  Probe
ggtgagcaggacagctcctgtcccc

SEQ ID NO: 1034 - DNA, 25 bp, Artificial Sequence
  Probe
tgtccccagcgaagaatccggctgc

SEQ ID NO: 1035 - DNA, 25 bp, Artificial Sequence
  Probe
tgatgggtgtaactgacccccacag

SEQ ID NO: 1036 - DNA, 25 bp, Artificial Sequence
  Probe
tgcttctcaagtctaaccagcctca

SEQ ID NO: 1037 - DNA, 25 bp, Artificial Sequence
  Probe
cagcagtgtgcatagaccatttcca

SEQ ID NO: 1038 - DNA, 25 bp, Artificial Sequence
  Probe
ccatggacaatgcatgccctcgtta

SEQ ID NO: 1039 - DNA, 25 bp, Artificial Sequence
  Probe
gcatgccctcgttatcttgaaaagc

SEQ ID NO: 1040 - DNA, 25 bp, Artificial Sequence
  Probe
cttccacaggctgcactcgaggaga

SEQ ID NO: 1041 - DNA, 25 bp, Artificial Sequence
  Probe
gatccacaaattctcaggaacctac

SEQ ID NO: 1042 - DNA, 25 bp, Artificial Sequence
  Probe
aggaacctacacctgcatgaacact

SEQ ID NO: 1043 - DNA, 25 bp, Artificial Sequence
  Probe
tgaggagccacggagtttgggggcc

SEQ ID NO: 1044 - DNA, 25 bp, Artificial Sequence
  Probe
tctccattcgatatcagctcgttcg

SEQ ID NO: 1045 - DNA, 25 bp, Artificial Sequence
  Probe
gctcgttcgactcttctatgatgtc

SEQ ID NO: 1046 - DNA, 25 bp, Artificial Sequence
  Probe
tacctcacagtctctaggattcctg

SEQ ID NO: 1047 - DNA, 25 bp, Artificial Sequence
  Probe
ctttctctgtgatcattggcatcct

SEQ ID NO: 1048 - DNA, 25 bp, Artificial Sequence
  Probe
cagctttttttgcagttatccacac

SEQ ID NO: 1049 - DNA, 25 bp, Artificial Sequence
  Probe
cagttatccacactcacatttcaga

SEQ ID NO: 1050 - DNA, 25 bp, Artificial Sequence
  Probe
gagtcctgactctcaaggaaccact

SEQ ID NO: 1051 - DNA, 25 bp, Artificial Sequence
  Probe
ccagggctaggaacacaggctccac

SEQ ID NO: 1052 - DNA, 25 bp, Artificial Sequence
  Probe
caggctccacggtgacatgtcattt

SEQ ID NO: 1053 - DNA, 25 bp, Artificial Sequence
  Probe
actaagcagggggccacatgctctc

SEQ ID NO: 1054 - DNA, 25 bp, Artificial Sequence
  Probe
gggccacatgctctcaatggagaca

SEQ ID NO: 1055 - DNA, 25 bp, Artificial Sequence
  Probe
cgccagcagtcagcacagcgaaggc

SEQ ID NO: 1056 - DNA, 25 bp, Artificial Sequence
  Probe
gcgaaggcagtcggagcagtggctc

SEQ ID NO: 1057 - DNA, 25 bp, Artificial Sequence
  Probe
cggagcagtggctccaaccgtagcg

SEQ ID NO: 1058 - DNA, 25 bp, Artificial Sequence
  Probe
aaccgtagcggtagcgatcggcgga

SEQ ID NO: 1059 - DNA, 25 bp, Artificial Sequence
  Probe
gcggtagcgatcggcggaaggagaa

SEQ ID NO: 1060 - DNA, 25 bp, Artificial Sequence
  Probe
ccacaccacacgcagcagtctgcgg

SEQ ID NO: 1061 - DNA, 25 bp, Artificial Sequence
  Probe
ccacacgcagcagtctgcgggggcc

SEQ ID NO: 1062 - DNA, 25 bp, Artificial Sequence
  Probe
gtccttccgcatggccatgggaaac

SEQ ID NO: 1063 - DNA, 25 bp, Artificial Sequence
  Probe
atgggaaaccccagtgagttctttg

SEQ ID NO: 1064 - DNA, 25 bp, Artificial Sequence
  Probe
gagttctttgtggatgtgatgtgat

SEQ ID NO: 1065 - DNA, 25 bp, Artificial Sequence
  Probe
tgatgtgatgtgagcagggcccctc

SEQ ID NO: 1066 - DNA, 25 bp, Artificial Sequence
  Probe
cagggcagtgcctgctcccagaatc

SEQ ID NO: 1067 - DNA, 25 bp, Artificial Sequence
  Probe
ctgctcccagaatctggtgctctga

SEQ ID NO: 1068 - DNA, 25 bp, Artificial Sequence
  Probe
cccagaatctggtgctctgaccagg

SEQ ID NO: 1069 - DNA, 25 bp, Artificial Sequence
  Probe
aatctggtgctctgaccaggccagg

SEQ ID NO: 1070 - DNA, 25 bp, Artificial Sequence
  Probe
acggtgagagcacttctgtcttaaa

SEQ ID NO: 1071 - DNA, 25 bp, Artificial Sequence
  Probe
gagagcacttctgtcttaaaggttt

SEQ ID NO: 1072 - DNA, 25 bp, Artificial Sequence
  Probe
tatttatcgaggcctctttggtgag

SEQ ID NO: 1073 - DNA, 25 bp, Artificial Sequence
  Probe
atcgaggcctctttggtgagcctgg

SEQ ID NO: 1074 - DNA, 25 bp, Artificial Sequence
  Probe
tccctctacccttgagcaagggcag

SEQ ID NO: 1075 - DNA, 25 bp, Artificial Sequence
  Probe
gggtccctgagctgttcttctgccc

SEQ ID NO: 1076 - DNA, 25 bp, Artificial Sequence
  Probe
cctgagctgttcttctgccccatac

SEQ ID NO: 1077 - DNA, 25 bp, Artificial Sequence
  Probe
ttctgccccatactgaaggaactga

SEQ ID NO: 1078 - DNA, 25 bp, Artificial Sequence
  Probe
ccccatactgaaggaactgaggcct

SEQ ID NO: 1079 - DNA, 25 bp, Artificial Sequence
  Probe
aaggaactgaggcctgggtgattta

SEQ ID NO: 1080 - DNA, 25 bp, Artificial Sequence
  Probe
gagacagactgactgacagccatgg

SEQ ID NO: 1081 - DNA, 25 bp, Artificial Sequence
  Probe
agactgactgacagccatgggtggt

SEQ ID NO: 1082 - DNA, 25 bp, Artificial Sequence
  Probe
ctggctgggcgtgtaggacggtgag

SEQ ID NO: 1083 - DNA, 25 bp, Artificial Sequence
  Probe
taggacggtgagagcacttctgtct

SEQ ID NO: 1084 - DNA, 25 bp, Artificial Sequence
  Probe
atttatttatcgaggcctctttggt

SEQ ID NO: 1085 - DNA, 25 bp, Artificial Sequence
  Probe
ctccctctacccttgagcaagggca

SEQ ID NO: 1086 - DNA, 25 bp, Artificial Sequence
  Probe
ggaactgaggcctgggtgatttatt

SEQ ID NO: 1087 - DNA, 25 bp, Artificial Sequence
  Probe
gactgactgacagccatgggtggtc

SEQ ID NO: 1088 - DNA, 25 bp, Artificial Sequence
  Probe
ggtggtcagatggtggggtgggccc

SEQ ID NO: 1089 - DNA, 25 bp, Artificial Sequence
  Probe
gctgccccccaggatggatatgaga

SEQ ID NO: 1090 - DNA, 25 bp, Artificial Sequence
  Probe
tgggggaccttcactgatgtgggca

SEQ ID NO: 1091 - DNA, 25 bp, Artificial Sequence
  Probe
accctccaatctgcactttgatttg

SEQ ID NO: 1092 - DNA, 25 bp, Artificial Sequence
  Probe
tgatttgcttcctaacagctctgtt

SEQ ID NO: 1093 - DNA, 25 bp, Artificial Sequence
  Probe
gctggaaggggccacgtggatgggc

SEQ ID NO: 1094 - DNA, 25 bp, Artificial Sequence
  Probe
agaggcagcatgcttgggctgaccc

SEQ ID NO: 1095 - DNA, 25 bp, Artificial Sequence
  Probe
ctgtgccaacctgttcttagagtgt

SEQ ID NO: 1096 - DNA, 25 bp, Artificial Sequence
  Probe
gagtgtagctgtaagggcagtgccc

SEQ ID NO: 1097 - DNA, 25 bp, Artificial Sequence
  Probe
gcagtgcccatgtgtacattctgcc

SEQ ID NO: 1098 - DNA, 25 bp, Artificial Sequence
  Probe
acattctgcctagagtgtagcctaa

SEQ ID NO: 1099 - DNA, 25 bp, Artificial Sequence
  Probe
gtgtagcctaaagggcagggcccac

SEQ ID NO: 1100 - DNA, 25 bp, Artificial Sequence
  Probe
agggcccacgtgtatagtatctgta

SEQ ID NO: 1101 - DNA, 25 bp, Artificial Sequence
  Probe
ccaccttcacctcggagggacggag

SEQ ID NO: 1102 - DNA, 25 bp, Artificial Sequence
  Probe
gaagtggagacagtcctttcccacc

SEQ ID NO: 1103 - DNA, 25 bp, Artificial Sequence
  Probe
ggcatggtcccttaaggcacagtgg

SEQ ID NO: 1104 - DNA, 25 bp, Artificial Sequence
  Probe
gattgagaaccaccagtttagctag

SEQ ID NO: 1105 - DNA, 25 bp, Artificial Sequence
  Probe
gaaccaccagtttagctagtcaata

SEQ ID NO: 1106 - DNA, 25 bp, Artificial Sequence
  Probe
ggatggtggtttattctcagaagaa

SEQ ID NO: 1107 - DNA, 25 bp, Artificial Sequence
  Probe
ccagatgagagccaatgtcagataa

SEQ ID NO: 1108 - DNA, 25 bp, Artificial Sequence
  Probe
tttgtcttttggattatctgtttac

SEQ ID NO: 1109 - DNA, 25 bp, Artificial Sequence
  Probe
tggattatctgtttactgtctcatc

SEQ ID NO: 1110 - DNA, 25 bp, Artificial Sequence
  Probe
tactgtctcatctgaactgatccca

SEQ ID NO: 1111 - DNA, 25 bp, Artificial Sequence
  Probe
gtctcatctgaactgatcccaggtg

SEQ ID NO: 1112 - DNA, 25 bp, Artificial Sequence
  Probe
gatcccaggtgaacggtttattgcc

SEQ ID NO: 1113 - DNA, 25 bp, Artificial Sequence
  Probe
ggtttattgcctagatttgtactca

SEQ ID NO: 1114 - DNA, 25 bp, Artificial Sequence
  Probe
gcctagatttgtactcagaggaatt

SEQ ID NO: 1115 - DNA, 25 bp, Artificial Sequence
  Probe
aaggagttaaaagcttcttctcaat

SEQ ID NO: 1116 - DNA, 25 bp, Artificial Sequence
  Probe
tgagccatgcaatctgggaagcaca

SEQ ID NO: 1117 - DNA, 25 bp, Artificial Sequence
  Probe
ggaagcacaggaataagtagacact

SEQ ID NO: 1118 - DNA, 25 bp, Artificial Sequence
  Probe
atgaagacatgtatccataagaagg

SEQ ID NO: 1119 - DNA, 25 bp, Artificial Sequence
  Probe
ataagaaggagtgctcttcatcaac

SEQ ID NO: 1120 - DNA, 25 bp, Artificial Sequence
  Probe
ttcatcaactaatagagcacctacc

SEQ ID NO: 1121 - DNA, 25 bp, Artificial Sequence
  Probe
tagagcacctaccacagtgtcatac

SEQ ID NO: 1122 - DNA, 25 bp, Artificial Sequence
  Probe
cacctaccacagtgtcatacctggt

SEQ ID NO: 1123 - DNA, 25 bp, Artificial Sequence
  Probe
cacagtgtcatacctggtagaggtg

SEQ ID NO: 1124 - DNA, 25 bp, Artificial Sequence
  Probe
atatattcatgaggctggaagtaag

SEQ ID NO: 1125 - DNA, 25 bp, Artificial Sequence
  Probe
gaggatggggcttagatagtatcga

SEQ ID NO: 1126 - DNA, 25 bp, Artificial Sequence
  Probe
acatcaccaaatgttccctgggggt

SEQ ID NO: 1127 - DNA, 25 bp, Artificial Sequence
  Probe
atttgcccttgattgagaaccacca

SEQ ID NO: 1128 - DNA, 25 bp, Artificial Sequence
  Probe
gaaccaccagtttagctagtcaata

SEQ ID NO: 1129 - DNA, 25 bp, Artificial Sequence
  Probe
cttcaacctcaacctatctttatgt

SEQ ID NO: 1130 - DNA, 25 bp, Artificial Sequence
  Probe
agaggagcttcttttcagaacccca

SEQ ID NO: 1131 - DNA, 25 bp, Artificial Sequence
  Probe
agaaccccagatgagagccaatgtc

SEQ ID NO: 1132 - DNA, 25 bp, Artificial Sequence
  Probe
atttccagggaaaatcctctttgca

SEQ ID NO: 1133 - DNA, 25 bp, Artificial Sequence
  Probe
gattatctgtttactgtctcatctg

SEQ ID NO: 1134 - DNA, 25 bp, Artificial Sequence
  Probe
gtctcatctgaactgatcccaggtg

SEQ ID NO: 1135 - DNA, 25 bp, Artificial Sequence
  Probe
gatcccaggtgaacggtttattgcc

SEQ ID NO: 1136 - DNA, 25 bp, Artificial Sequence
  Probe
gtttattgcctagatttgtactcag

SEQ ID NO: 1137 - DNA, 25 bp, Artificial Sequence
  Probe
tgcctgctatgtgcacggcatgggc

SEQ ID NO: 1138 - DNA, 25 bp, Artificial Sequence
  Probe
gcacggcatgggcccatatgtgtga

SEQ ID NO: 1139 - DNA, 25 bp, Artificial Sequence
  Probe
gatctcggtagttacgtattgggca

SEQ ID NO: 1140 - DNA, 25 bp, Artificial Sequence
  Probe
aattatcctcagtgtagcttcttgg

SEQ ID NO: 1141 - DNA, 25 bp, Artificial Sequence
  Probe
aaaactcctgttgagactgtgtctt

SEQ ID NO: 1142 - DNA, 25 bp, Artificial Sequence
  Probe
gactgtgtcttatgaacctctgaaa

SEQ ID NO: 1143 - DNA, 25 bp, Artificial Sequence
  Probe
gaacctctgaaacgtacaagccttc

SEQ ID NO: 1144 - DNA, 25 bp, Artificial Sequence
  Probe
aatctttctgtagttatctgcataa

SEQ ID NO: 1145 - DNA, 25 bp, Artificial Sequence
  Probe
ctggctcctgggttgacaatttgtg

SEQ ID NO: 1146 - DNA, 25 bp, Artificial Sequence
  Probe
gaaacaactctattgctactattta

SEQ ID NO: 1147 - DNA, 25 bp, Artificial Sequence
  Probe
gtttatttgtttgatgggtcccagg

SEQ ID NO: 1148 - DNA, 25 bp, Artificial Sequence
  Probe
tgaagtggaacggtgactctctctt

SEQ ID NO: 1149 - DNA, 25 bp, Artificial Sequence
  Probe
cctgctaggagccagctggaagaat

SEQ ID NO: 1150 - DNA, 25 bp, Artificial Sequence
  Probe
gagattctgcagatgacaggattct

SEQ ID NO: 1151 - DNA, 25 bp, Artificial Sequence
  Probe
gaaagagtggtctcacctccaaatt

SEQ ID NO: 1152 - DNA, 25 bp, Artificial Sequence
  Probe
tggtctcacctccaaattaccatgt

SEQ ID NO: 1153 - DNA, 25 bp, Artificial Sequence
  Probe
gaagcatagggtacctggtgtgcct

SEQ ID NO: 1154 - DNA, 25 bp, Artificial Sequence
  Probe
gtgtgcctaatcccttataaatgcc

SEQ ID NO: 1155 - DNA, 25 bp, Artificial Sequence
  Probe
atttaattctttccttatggtgata

SEQ ID NO: 1156 - DNA, 25 bp, Artificial Sequence
  Probe
cgtagaatacttactatccttggaa

SEQ ID NO: 1157 - DNA, 25 bp, Artificial Sequence
  Probe
tcctttgcaaacagtccagtcactt

SEQ ID NO: 1158 - DNA, 25 bp, Artificial Sequence
  Probe
acagtccagtcacttgcttgttaaa

SEQ ID NO: 1159 - DNA, 25 bp, Artificial Sequence
  Probe
caagtaccaggtgtgggagtggctc

SEQ ID NO: 1160 - DNA, 25 bp, Artificial Sequence
  Probe
ctcctggacaccaaccagctggatg

SEQ ID NO: 1161 - DNA, 25 bp, Artificial Sequence
  Probe
tggacaccaaccagctggatgccaa

SEQ ID NO: 1162 - DNA, 25 bp, Artificial Sequence
  Probe
acaccaaccagctggatgccaattg

SEQ ID NO: 1163 - DNA, 25 bp, Artificial Sequence
  Probe
tggatgccaattgtatccctttcca

SEQ ID NO: 1164 - DNA, 25 bp, Artificial Sequence
  Probe
attgtatccctttccaagagttcga

SEQ ID NO: 1165 - DNA, 25 bp, Artificial Sequence
  Probe
gtatccctttccaagagttcgacat

SEQ ID NO: 1166 - DNA, 25 bp, Artificial Sequence
  Probe
tccctttccaagagttcgacatcaa

SEQ ID NO: 1167 - DNA, 25 bp, Artificial Sequence
  Probe
agttcgacatcaacggcgagcacct

SEQ ID NO: 1168 - DNA, 25 bp, Artificial Sequence
  Probe
ctcctctacagcaacttgcagcatc

SEQ ID NO: 1169 - DNA, 25 bp, Artificial Sequence
  Probe
ctctacagcaacttgcagcatctga

SEQ ID NO: 1170 - DNA, 25 bp, Artificial Sequence
  Probe
ggtggacactgacgagctggacagc

SEQ ID NO: 1171 - DNA, 25 bp, Artificial Sequence
  Probe
gagaccattgagttcttcgtcactg

SEQ ID NO: 1172 - DNA, 25 bp, Artificial Sequence
  Probe
cactgaagaaatcattcccctcgga

SEQ ID NO: 1173 - DNA, 25 bp, Artificial Sequence
  Probe
aggagtgacctggagcactgtgcgc

SEQ ID NO: 1174 - DNA, 25 bp, Artificial Sequence
  Probe
tggattctgccattgcgacacattt

SEQ ID NO: 1175 - DNA, 25 bp, Artificial Sequence
  Probe
gcgacacatttttgtgcctttcagc

SEQ ID NO: 1176 - DNA, 25 bp, Artificial Sequence
  Probe
agcccctggtgtctgcagtggggga

SEQ ID NO: 1177 - DNA, 25 bp, Artificial Sequence
  Probe
gcttccacttctttcttgtttggag

SEQ ID NO: 1178 - DNA, 25 bp, Artificial Sequence
  Probe
ggctccgaagacttagcgacgcact

SEQ ID NO: 1179 - DNA, 25 bp, Artificial Sequence
  Probe
ctgtacacagccgagcagcatttcc

SEQ ID NO: 1180 - DNA, 25 bp, Artificial Sequence
  Probe
tccgttgaaggacttgcatccccat

SEQ ID NO: 1181 - DNA, 25 bp, Artificial Sequence
  Probe
tgagctacaggactcccgagtgtga

SEQ ID NO: 1182 - DNA, 25 bp, Artificial Sequence
  Probe
tggattctgccattgcgacacattt

SEQ ID NO: 1183 - DNA, 25 bp, Artificial Sequence
  Probe
gcgacacatttttgtgcctttcagc

SEQ ID NO: 1184 - DNA, 25 bp, Artificial Sequence
  Probe
agcccctggtgtctgcagtggggga

SEQ ID NO: 1185 - DNA, 25 bp, Artificial Sequence
  Probe
cagtgggggatttaaggcacccgct

SEQ ID NO: 1186 - DNA, 25 bp, Artificial Sequence
  Probe
gcttccacttctttcttgtttggag

SEQ ID NO: 1187 - DNA, 25 bp, Artificial Sequence
  Probe
ttggagttttctgttggaaccgccg

SEQ ID NO: 1188 - DNA, 25 bp, Artificial Sequence
  Probe
ggctccgaagacttagcgacgccac

SEQ ID NO: 1189 - DNA, 25 bp, Artificial Sequence
  Probe
ctgtacacagccgagcagcatttcc

SEQ ID NO: 1190 - DNA, 25 bp, Artificial Sequence
  Probe
tccgttgaaggacttgcatccccat

SEQ ID NO: 1191 - DNA, 25 bp, Artificial Sequence
  Probe
caccgtgcaggttgtggccggtttt

SEQ ID NO: 1192 - DNA, 25 bp, Artificial Sequence
  Probe
ggagagaaggcgcaccatgatggaa

SEQ ID NO: 1193 - DNA, 25 bp, Artificial Sequence
  Probe
gatggaagatttccggaagtaccgg

SEQ ID NO: 1194 - DNA, 25 bp, Artificial Sequence
  Probe
ggagcagaaaaacgagcgcctggag

SEQ ID NO: 1195 - DNA, 25 bp, Artificial Sequence
  Probe
agcgcctggagttgcgaggaggggt

SEQ ID NO: 1196 - DNA, 25 bp, Artificial Sequence
  Probe
gttgcgaggaggggtggacactgac

SEQ ID NO: 1197 - DNA, 25 bp, Artificial Sequence
  Probe
ggtggacactgacgagctggacagc

SEQ ID NO: 1198 - DNA, 25 bp, Artificial Sequence
  Probe
cgagctggacagcaacgtggacgac

SEQ ID NO: 1199 - DNA, 25 bp, Artificial Sequence
  Probe
acgtggacgactgggaagaggagac

SEQ ID NO: 1200 - DNA, 25 bp, Artificial Sequence
  Probe
ggagaccattgagttcttcgtcact

SEQ ID NO: 1201 - DNA, 25 bp, Artificial Sequence
  Probe
accattgagttcttcgtcactgaag

SEQ ID NO: 1202 - DNA, 25 bp, Artificial Sequence
  Probe
gttttctccgcaggttgaacatgga

SEQ ID NO: 1203 - DNA, 25 bp, Artificial Sequence
  Probe
ctgcctgtttcctcccaatggaggg

SEQ ID NO: 1204 - DNA, 25 bp, Artificial Sequence
  Probe
ccccgctgccattttgatagtataa

SEQ ID NO: 1205 - DNA, 25 bp, Artificial Sequence
  Probe
ggggagagggagtcatctcttccta

SEQ ID NO: 1206 - DNA, 25 bp, Artificial Sequence
  Probe
gtcatctcttcctatatttggtggg

SEQ ID NO: 1207 - DNA, 25 bp, Artificial Sequence
  Probe
gatttgggggggaatcttctgcctc

SEQ ID NO: 1208 - DNA, 25 bp, Artificial Sequence
  Probe
aacatgaattttcagttccctccct

SEQ ID NO: 1209 - DNA, 25 bp, Artificial Sequence
  Probe
caaaggaccctttcaatgtccctgg

SEQ ID NO: 1210 - DNA, 25 bp, Artificial Sequence
  Probe
gacataaagcctgtcctgtctctat

SEQ ID NO: 1211 - DNA, 25 bp, Artificial Sequence
  Probe
ctgtcctgtctctattctaggcaag

SEQ ID NO: 1212 - DNA, 25 bp, Artificial Sequence
  Probe
ggttcaaaagactcctgggctcacc

SEQ ID NO: 1213 - DNA, 25 bp, Artificial Sequence
  Probe
gatttgggggacagtgctacactcg

SEQ ID NO: 1214 - DNA, 25 bp, Artificial Sequence
  Probe
ggctgtttgatgtcctgcacgagcc

SEQ ID NO: 1215 - DNA, 25 bp, Artificial Sequence
  Probe
tgcacgagcccttcttgaaagtacc

SEQ ID NO: 1216 - DNA, 25 bp, Artificial Sequence
  Probe
gcccttcttgaaagtaccctgatga

SEQ ID NO: 1217 - DNA, 25 bp, Artificial Sequence
  Probe
ccttcttgaaagtaccctgatgacc

SEQ ID NO: 1218 - DNA, 25 bp, Artificial Sequence
  Probe
ttcttgaaagtaccctgatgacccc

SEQ ID NO: 1219 - DNA, 25 bp, Artificial Sequence
  Probe
tcttgaaagtaccctgatgacccca

SEQ ID NO: 1220 - DNA, 25 bp, Artificial Sequence
  Probe
aagatctggccttatgcccaggcct

SEQ ID NO: 1221 - DNA, 25 bp, Artificial Sequence
  Probe
ccctcagaaagcccggaggctgttt

SEQ ID NO: 1222 - DNA, 25 bp, Artificial Sequence
  Probe
ctcagaaagcccggaggctgtttga

SEQ ID NO: 1223 - DNA, 25 bp, Artificial Sequence
  Probe
gaaagcccggaggctgtttgatgtc

SEQ ID NO: 1224 - DNA, 25 bp, Artificial Sequence
  Probe
aagcccggaggctgtttgatgtcct

SEQ ID NO: 1225 - DNA, 25 bp, Artificial Sequence
  Probe
tttggcgacgtaattcccgactatg

SEQ ID NO: 1226 - DNA, 25 bp, Artificial Sequence
  Probe
tcccgactatgtgctgggccagagc

SEQ ID NO: 1227 - DNA, 25 bp, Artificial Sequence
  Probe
tacatccatgggcggctgcagagcc

SEQ ID NO: 1228 - DNA, 25 bp, Artificial Sequence
  Probe
cctggggaagaacttcgccttgcgg

SEQ ID NO: 1229 - DNA, 25 bp, Artificial Sequence
  Probe
gaagctagagcaggacttcgtctcc

SEQ ID NO: 1230 - DNA, 25 bp, Artificial Sequence
  Probe
cttcgtctcccgggtgactgaatgt

SEQ ID NO: 1231 - DNA, 25 bp, Artificial Sequence
  Probe
gactgaatgtctgaccaccgtgaag

SEQ ID NO: 1232 - DNA, 25 bp, Artificial Sequence
  Probe
acaaaacggacagtcagaccctcct

SEQ ID NO: 1233 - DNA, 25 bp, Artificial Sequence
  Probe
cctcctgaccacatttggatctctg

SEQ ID NO: 1234 - DNA, 25 bp, Artificial Sequence
  Probe
ttggatctctggaacagctcatcgc

SEQ ID NO: 1235 - DNA, 25 bp, Artificial Sequence
  Probe
cagctcatcgccgcatcaagagaag

SEQ ID NO: 1236 - DNA, 25 bp, Artificial Sequence
  Probe
tacaaggttcatgcttatggcctga

SEQ ID NO: 1237 - DNA, 25 bp, Artificial Sequence
  Probe
gaaaataaccacatcccaggctgac

SEQ ID NO: 1238 - DNA, 25 bp, Artificial Sequence
  Probe
acagaacatgttccaccaagcctgc

SEQ ID NO: 1239 - DNA, 25 bp, Artificial Sequence
  Probe
gcctgcagaatgtccaaatgtccta

SEQ ID NO: 1240 - DNA, 25 bp, Artificial Sequence
  Probe
ctaagaatgcagcccccattactta

SEQ ID NO: 1241 - DNA, 25 bp, Artificial Sequence
  Probe
gcagcccccattacttaaatataac

SEQ ID NO: 1242 - DNA, 25 bp, Artificial Sequence
  Probe
ggttgcaggattaatggtcgtggat

SEQ ID NO: 1243 - DNA, 25 bp, Artificial Sequence
  Probe
tagtgagcttatctgcacactccaa

SEQ ID NO: 1244 - DNA, 25 bp, Artificial Sequence
  Probe
atctgcacactccaagtttaactat

SEQ ID NO: 1245 - DNA, 25 bp, Artificial Sequence
  Probe
ctgctttctgaggacactctactct

SEQ ID NO: 1246 - DNA, 25 bp, Artificial Sequence
  Probe
ctgaggacactctactctgtaaagg

SEQ ID NO: 1247 - DNA, 25 bp, Artificial Sequence
  Probe
attgctgcctctattatggcacttc

SEQ ID NO: 1248 - DNA, 25 bp, Artificial Sequence
  Probe
ggcacttcaattttgcactgtcttt

SEQ ID NO: 1249 - DNA, 25 bp, Artificial Sequence
  Probe
gtaaatgctgccatgttccaaaccc

SEQ ID NO: 1250 - DNA, 25 bp, Artificial Sequence
  Probe
gtgtttagagctgtgcaccctagaa

SEQ ID NO: 1251 - DNA, 25 bp, Artificial Sequence
  Probe
attatgccagtttctgttctctcac

SEQ ID NO: 1252 - DNA, 25 bp, Artificial Sequence
  Probe
tttttgtgcactacatactcttcag

SEQ ID NO: 1253 - DNA, 25 bp, Artificial Sequence
  Probe
gattaatatgcccttttgccgatgc

SEQ ID NO: 1254 - DNA, 25 bp, Artificial Sequence
  Probe
tactgatgtgactcggttttgtcgc

SEQ ID NO: 1255 - DNA, 25 bp, Artificial Sequence
  Probe
ttttgtcgcagctttgctttgttta

SEQ ID NO: 1256 - DNA, 25 bp, Artificial Sequence
  Probe
cacacttgtaaacctcttttgcact

SEQ ID NO: 1257 - DNA, 25 bp, Artificial Sequence
  Probe
gatgctcgagcacctgtaaacaatt

SEQ ID NO: 1258 - DNA, 25 bp, Artificial Sequence
  Probe
tgccaggggtggtcccacctaaaga

SEQ ID NO: 1259 - DNA, 25 bp, Artificial Sequence
  Probe
gatggactgtgctgcagtatcacca

SEQ ID NO: 1260 - DNA, 25 bp, Artificial Sequence
  Probe
gtatcaccagaagacattagggggc

SEQ ID NO: 1261 - DNA, 25 bp, Artificial Sequence
  Probe
tagggggcagtaggcccccacacaa

SEQ ID NO: 1262 - DNA, 25 bp, Artificial Sequence
  Probe
taaaggggaggactttctgccaact

SEQ ID NO: 1263 - DNA, 25 bp, Artificial Sequence
  Probe
gccttgggaaagccagttgccctga

SEQ ID NO: 1264 - DNA, 25 bp, Artificial Sequence
  Probe
acaccatggaatgtcctttgcacgc

SEQ ID NO: 1265 - DNA, 25 bp, Artificial Sequence
  Probe
gtcctttgcacgcattaaatggtac

SEQ ID NO: 1266 - DNA, 25 bp, Artificial Sequence
  Probe
ggtacagaactgaagcctcggaagc

SEQ ID NO: 1267 - DNA, 25 bp, Artificial Sequence
  Probe
gaagcctcggaagcaatttggaact

SEQ ID NO: 1268 - DNA, 25 bp, Artificial Sequence
  Probe
tttgccccaaagtgaggggctccac

SEQ ID NO: 1269 - DNA, 25 bp, Artificial Sequence
  Probe
ctccaaaccagatccaatcaaacct

SEQ ID NO: 1270 - DNA, 25 bp, Artificial Sequence
  Probe
aatcaaacctcagcccgaggaaaca

SEQ ID NO: 1271 - DNA, 25 bp, Artificial Sequence
  Probe
acctcagcccgaggaaacatgctcc

SEQ ID NO: 1272 - DNA, 25 bp, Artificial Sequence
  Probe
ttgtgctgtggcttagccggagggg

SEQ ID NO: 1273 - DNA, 25 bp, Artificial Sequence
  Probe
gcttagccggaggggacgtggccaa

SEQ ID NO: 1274 - DNA, 25 bp, Artificial Sequence
  Probe
gccaagggtgaggtggccaaaacca

SEQ ID NO: 1275 - DNA, 25 bp, Artificial Sequence
  Probe
ctccagctctactttatgtcctgaa

SEQ ID NO: 1276 - DNA, 25 bp, Artificial Sequence
  Probe
tcctgaagctgacccgaggtcttcc

SEQ ID NO: 1277 - DNA, 25 bp, Artificial Sequence
  Probe
acccgaggtcttcctatctggaatg

SEQ ID NO: 1278 - DNA, 25 bp, Artificial Sequence
  Probe
gaggtcttcctatctggaatgacta

SEQ ID NO: 1279 - DNA, 25 bp, Artificial Sequence
  Probe
ggaatgactagagggagccaagagg

SEQ ID NO: 1280 - DNA, 25 bp, Artificial Sequence
  Probe
taccatctcccaacttttaaagcca

SEQ ID NO: 1281 - DNA, 25 bp, Artificial Sequence
  Probe
ttgagctttcaaacacacatgcaca

SEQ ID NO: 1282 - DNA, 25 bp, Artificial Sequence
  Probe
ggaggattcctgcaggcttaacagt

SEQ ID NO: 1283 - DNA, 25 bp, Artificial Sequence
  Probe
gcaggcttaacagttggcatcgtac

SEQ ID NO: 1284 - DNA, 25 bp, Artificial Sequence
  Probe
ggttggcagttaactctttcaccct

SEQ ID NO: 1285 - DNA, 25 bp, Artificial Sequence
  Probe
taactctttcaccctactaaattca

SEQ ID NO: 1286 - DNA, 25 bp, Artificial Sequence
  Probe
taaattcaagagctcatctccaccc

SEQ ID NO: 1287 - DNA, 25 bp, Artificial Sequence
  Probe
caccctgtcctgtatattttctaca

SEQ ID NO: 1288 - DNA, 25 bp, Artificial Sequence
  Probe
tacttggtagtgtcagcgggcatct

SEQ ID NO: 1289 - DNA, 25 bp, Artificial Sequence
  Probe
ggcatcttttacaccttctagtagc

SEQ ID NO: 1290 - DNA, 25 bp, Artificial Sequence
  Probe
agtaaaaccttgtacttctctattg

SEQ ID NO: 1291 - DNA, 25 bp, Artificial Sequence
  Probe
taaaatcgcctcacagatcacactc

SEQ ID NO: 1292 - DNA, 25 bp, Artificial Sequence
  Probe
gatcacactcgctggtggcaaatat

SEQ ID NO: 1293 - DNA, 25 bp, Artificial Sequence
  Probe
atgggaggctgcacagaagaccctg

SEQ ID NO: 1294 - DNA, 25 bp, Artificial Sequence
  Probe
caggaggggcattgtcagtggctgc

SEQ ID NO: 1295 - DNA, 25 bp, Artificial Sequence
  Probe
cccatggacatccctacaggtactg

SEQ ID NO: 1296 - DNA, 25 bp, Artificial Sequence
  Probe
ggtactgtcatgtgaagccttgcct

SEQ ID NO: 1297 - DNA, 25 bp, Artificial Sequence
  Probe
tgaagccttgcctagtagttctctc

SEQ ID NO: 1298 - DNA, 25 bp, Artificial Sequence
  Probe
aaacctcttattcacatttgctttg

SEQ ID NO: 1299 - DNA, 25 bp, Artificial Sequence
  Probe
tttgctttgattccccgatggagta

SEQ ID NO: 1300 - DNA, 25 bp, Artificial Sequence
  Probe
agtagactgcctttgttccatacag

SEQ ID NO: 1301 - DNA, 25 bp, Artificial Sequence
  Probe
atatcatcctacttcttattagcat

SEQ ID NO: 1302 - DNA, 25 bp, Artificial Sequence
  Probe
cacgatggagagaaccgcgcactac

SEQ ID NO: 1303 - DNA, 25 bp, Artificial Sequence
  Probe
cgcgcactacgggatgctgtttgat

SEQ ID NO: 1304 - DNA, 25 bp, Artificial Sequence
  Probe
atatcaaggcttgtcacacctggaa

SEQ ID NO: 1305 - DNA, 25 bp, Artificial Sequence
  Probe
ggaagccctggaaattctgtccaat

SEQ ID NO: 1306 - DNA, 25 bp, Artificial Sequence
  Probe
ctcgcatgcttacagagcttctctt

SEQ ID NO: 1307 - DNA, 25 bp, Artificial Sequence
  Probe
ggccacacctgacaaactcaataag

SEQ ID NO: 1308 - DNA, 25 bp, Artificial Sequence
  Probe
aagagggctcatgactgggtggaag

SEQ ID NO: 1309 - DNA, 25 bp, Artificial Sequence
  Probe
ggaggccttgatgcgttggaattca

SEQ ID NO: 1310 - DNA, 25 bp, Artificial Sequence
  Probe
gtccttgcagaaagtgacccgggct

SEQ ID NO: 1311 - DNA, 25 bp, Artificial Sequence
  Probe
tgacccgggctttaagcggaccaag

SEQ ID NO: 1312 - DNA, 25 bp, Artificial Sequence
  Probe
gaactgtttccttgtctcagatgtt

SEQ ID NO: 1313 - DNA, 25 bp, Artificial Sequence
  Probe
tgcggagccttctcaggcagtgaca

SEQ ID NO: 1314 - DNA, 25 bp, Artificial Sequence
  Probe
tagcaagtcccagggcggagtccaa

SEQ ID NO: 1315 - DNA, 25 bp, Artificial Sequence
  Probe
ccaacctataccttctcagggaggc

SEQ ID NO: 1316 - DNA, 25 bp, Artificial Sequence
  Probe
gtggttggccattgggctgggagca

SEQ ID NO: 1317 - DNA, 25 bp, Artificial Sequence
  Probe
ggtggtttctgtcggaggaccagct

SEQ ID NO: 1318 - DNA, 25 bp, Artificial Sequence
  Probe
caagaggagttatttccaccccagt

SEQ ID NO: 1319 - DNA, 25 bp, Artificial Sequence
  Probe
aattcagggcagacctccttatgct

SEQ ID NO: 1320 - DNA, 25 bp, Artificial Sequence
  Probe
gggaatcgaagtcctctgctatgtc

SEQ ID NO: 1321 - DNA, 25 bp, Artificial Sequence
  Probe
tctgctatgtcttcagacgggtccc

SEQ ID NO: 1322 - DNA, 25 bp, Artificial Sequence
  Probe
atgaacgggagcacgggtgacgcca

SEQ ID NO: 1323 - DNA, 25 bp, Artificial Sequence
  Probe
cccagccactctgaaagtgccttga

SEQ ID NO: 1324 - DNA, 25 bp, Artificial Sequence
  Probe
gactaataccatgcatctgtgatca

SEQ ID NO: 1325 - DNA, 25 bp, Artificial Sequence
  Probe
gagctaaacttctgcatggttcata

SEQ ID NO: 1326 - DNA, 25 bp, Artificial Sequence
  Probe
aatatgcatgttatcgtcctttctt

SEQ ID NO: 1327 - DNA, 25 bp, Artificial Sequence
  Probe
tcttaacagtatgtgcccatttgca

SEQ ID NO: 1328 - DNA, 25 bp, Artificial Sequence
  Probe
gtcattgactgatcttgctctaacc

SEQ ID NO: 1329 - DNA, 25 bp, Artificial Sequence
  Probe
gtgattattgacctctgttgcattt

SEQ ID NO: 1330 - DNA, 25 bp, Artificial Sequence
  Probe
ttgcatttattctaaagccccccaa

SEQ ID NO: 1331 - DNA, 25 bp, Artificial Sequence
  Probe
aaattatctagccgtttcgaatatc

SEQ ID NO: 1332 - DNA, 25 bp, Artificial Sequence
  Probe
ttcgaatatcaacattaccctggtg

SEQ ID NO: 1333 - DNA, 25 bp, Artificial Sequence
  Probe
taccctggtgtattcactgctgtat

SEQ ID NO: 1334 - DNA, 25 bp, Artificial Sequence
  Probe
gctgtatgcattattgttctttgtt

SEQ ID NO: 1335 - DNA, 25 bp, Artificial Sequence
  Probe
tctagtcctttaatgagcatgaatt

SEQ ID NO: 1336 - DNA, 25 bp, Artificial Sequence
  Probe
tatacttctacatttgttgcttagt

SEQ ID NO: 1337 - DNA, 25 bp, Artificial Sequence
  Probe
atattgtcttctatactttgtaact

SEQ ID NO: 1338 - DNA, 25 bp, Artificial Sequence
  Probe
atttcacgtattgttgctttctctt

SEQ ID NO: 1339 - DNA, 25 bp, Artificial Sequence
  Probe
gttgctttctcttatatggaactta

SEQ ID NO: 1340 - DNA, 25 bp, Artificial Sequence
  Probe
ggaacttattgtgtacctcttacct

SEQ ID NO: 1341 - DNA, 25 bp, Artificial Sequence
  Probe
gtattcctagagtttacattcctaa

SEQ ID NO: 1342 - DNA, 25 bp, Artificial Sequence
  Probe
acgacgactttggctatttttgtgt

SEQ ID NO: 1343 - DNA, 25 bp, Artificial Sequence
  Probe
gttccctaccttcttaaggctatgg

SEQ ID NO: 1344 - DNA, 25 bp, Artificial Sequence
  Probe
atttgtgtaaatgttctccatatgt

SEQ ID NO: 1345 - DNA, 25 bp, Artificial Sequence
  Probe
caagtgttgcctcttgttttattga

SEQ ID NO: 1346 - DNA, 25 bp, Artificial Sequence
  Probe
tcaacctggccatgtgtcatctgaa

SEQ ID NO: 1347 - DNA, 25 bp, Artificial Sequence
  Probe
atctgaaactacaggccttctctgc

SEQ ID NO: 1348 - DNA, 25 bp, Artificial Sequence
  Probe
ccttctctgctgccattgaaagctg

SEQ ID NO: 1349 - DNA, 25 bp, Artificial Sequence
  Probe
aacaaggccctagaactggacagca

SEQ ID NO: 1350 - DNA, 25 bp, Artificial Sequence
  Probe
gaatgactttgaactggcacgggct

SEQ ID NO: 1351 - DNA, 25 bp, Artificial Sequence
  Probe
ggcacgggctgatttccagaaggtc

SEQ ID NO: 1352 - DNA, 25 bp, Artificial Sequence
  Probe
tttccagaaggtcctgcagctctac

SEQ ID NO: 1353 - DNA, 25 bp, Artificial Sequence
  Probe
tgtgccagcagcggatccgaaggca

SEQ ID NO: 1354 - DNA, 25 bp, Artificial Sequence
  Probe
tccgaaggcagcttgcccgggagaa

SEQ ID NO: 1355 - DNA, 25 bp, Artificial Sequence
  Probe
gaagaagctctatgccaatatgttt

SEQ ID NO: 1356 - DNA, 25 bp, Artificial Sequence
  Probe
acacggcagggagccagtctcaggt

SEQ ID NO: 1357 - DNA, 25 bp, Artificial Sequence
  Probe
tggttggatggtggctttaggggaa

SEQ ID NO: 1358 - DNA, 25 bp, Artificial Sequence
  Probe
gtaggctgggggattgaggtgggga

SEQ ID NO: 1359 - DNA, 25 bp, Artificial Sequence
  Probe
tcattttagctggtgtcagcccctc

SEQ ID NO: 1360 - DNA, 25 bp, Artificial Sequence
  Probe
ccttcctccattgcacatgaacata

SEQ ID NO: 1361 - DNA, 25 bp, Artificial Sequence
  Probe
tgtccatccatatatattcatcaga

SEQ ID NO: 1362 - DNA, 25 bp, Artificial Sequence
  Probe
tggagagggagactcctgggcagcc

SEQ ID NO: 1363 - DNA, 25 bp, Artificial Sequence
  Probe
catttccaaatgtggcctccatgtg

SEQ ID NO: 1364 - DNA, 25 bp, Artificial Sequence
  Probe
cacccccgacggtgtggctgatgat

SEQ ID NO: 1365 - DNA, 25 bp, Artificial Sequence
  Probe
gatgtcttctggtgtcatggtgacc

SEQ ID NO: 1366 - DNA, 25 bp, Artificial Sequence
  Probe
ctcttctctgcacgttgctgaaggt

SEQ ID NO: 1367 - DNA, 25 bp, Artificial Sequence
  Probe
tgcacgttgctgaaggtccaggctt

SEQ ID NO: 1368 - DNA, 25 bp, Artificial Sequence
  Probe
cactgcgcgttactccaggatatgc

SEQ ID NO: 1369 - DNA, 25 bp, Artificial Sequence
  Probe
gcgcgttactccaggatatgccgag

SEQ ID NO: 1370 - DNA, 25 bp, Artificial Sequence
  Probe
ctccaggatatgccgagtgcacgta

SEQ ID NO: 1371 - DNA, 25 bp, Artificial Sequence
  Probe
gccgagtgcacgtataaggtcatct

SEQ ID NO: 1372 - DNA, 25 bp, Artificial Sequence
  Probe
acgtataaggtcatcttcgtcgtcc

SEQ ID NO: 1373 - DNA, 25 bp, Artificial Sequence
  Probe
tctgcacgtcgtccaacgtgggact

SEQ ID NO: 1374 - DNA, 25 bp, Artificial Sequence
  Probe
acgtcgtccaacgtgggactggcgt

SEQ ID NO: 1375 - DNA, 25 bp, Artificial Sequence
  Probe
gtccaacgtgggactggcgtgtcgg

SEQ ID NO: 1376 - DNA, 25 bp, Artificial Sequence
  Probe
tctgcagagaaccagcctggctcct

SEQ ID NO: 1377 - DNA, 25 bp, Artificial Sequence
  Probe
gcccaaccatctcaccaggagaaag

SEQ ID NO: 1378 - DNA, 25 bp, Artificial Sequence
  Probe
catctcaccaggagaaagagccaca

SEQ ID NO: 1379 - DNA, 25 bp, Artificial Sequence
  Probe
ctgcccgagctggtgcattacagag

SEQ ID NO: 1380 - DNA, 25 bp, Artificial Sequence
  Probe
gagaaacacatcttccctagagggt

SEQ ID NO: 1381 - DNA, 25 bp, Artificial Sequence
  Probe
gagggttcctgtagacctagggagg

SEQ ID NO: 1382 - DNA, 25 bp, Artificial Sequence
  Probe
aggaccttatctgtgcgtgaaacac

SEQ ID NO: 1383 - DNA, 25 bp, Artificial Sequence
  Probe
gtgaaacacaccaggctgtgggcct

SEQ ID NO: 1384 - DNA, 25 bp, Artificial Sequence
  Probe
gtgtggactcaagtccttacctctt

SEQ ID NO: 1385 - DNA, 25 bp, Artificial Sequence
  Probe
tccttacctcttccggagatgtagc

SEQ ID NO: 1386 - DNA, 25 bp, Artificial Sequence
  Probe
tgtattgttcccagtgacacttcag

SEQ ID NO: 1387 - DNA, 25 bp, Artificial Sequence
  Probe
ttagtagcatgttgagccaggcctg

SEQ ID NO: 1388 - DNA, 25 bp, Artificial Sequence
  Probe
tctccttagtcttctcatagcatta

SEQ ID NO: 1389 - DNA, 25 bp, Artificial Sequence
  Probe
gtgttcctggcaatagtgtgttctg

SEQ ID NO: 1390 - DNA, 25 bp, Artificial Sequence
  Probe
gccctttgaggcattccctatggct

SEQ ID NO: 1391 - DNA, 25 bp, Artificial Sequence
  Probe
tacactcaaccctcatgtgagcgtg

SEQ ID NO: 1392 - DNA, 25 bp, Artificial Sequence
  Probe
tgccatcccaggccttaactagcaa

SEQ ID NO: 1393 - DNA, 25 bp, Artificial Sequence
  Probe
tacggagcgtgccaagtgacctggt

SEQ ID NO: 1394 - DNA, 25 bp, Artificial Sequence
  Probe
ggaagtgggttctcaggactggcat

SEQ ID NO: 1395 - DNA, 25 bp, Artificial Sequence
  Probe
gaaaacctggagctacagtgtcccc

SEQ ID NO: 1396 - DNA, 25 bp, Artificial Sequence
  Probe
gacaggggcctagatgtagcctctg

SEQ ID NO: 1397 - DNA, 25 bp, Artificial Sequence
  Probe
ggaaggtcccaagcttagtatccca

SEQ ID NO: 1398 - DNA, 25 bp, Artificial Sequence
  Probe
ttagtatcccacgtggcctttacaa

SEQ ID NO: 1399 - DNA, 25 bp, Artificial Sequence
  Probe
acaaatcctatggctggccttctca

SEQ ID NO: 1400 - DNA, 25 bp, Artificial Sequence
  Probe
ttggcatatggctgggagtccctta

SEQ ID NO: 1401 - DNA, 25 bp, Artificial Sequence
  Probe
ttctgtgtgcactgcatacgctgca

SEQ ID NO: 1402 - DNA, 25 bp, Artificial Sequence
  Probe
agccgtgggagttattctcccctag

SEQ ID NO: 1403 - DNA, 25 bp, Artificial Sequence
  Probe
tctcccctagagatcgacttggcag

SEQ ID NO: 1404 - DNA, 25 bp, Artificial Sequence
  Probe
gaaggattcttttctctttcatgct

SEQ ID NO: 1405 - DNA, 25 bp, Artificial Sequence
  Probe
tgcttctcaggctcaatagtttcta

SEQ ID NO: 1406 - DNA, 25 bp, Artificial Sequence
  Probe
gaaataaatacccatgtacccacca

SEQ ID NO: 1407 - DNA, 25 bp, Artificial Sequence
  Probe
acccaccactggacttcagaagtag

SEQ ID NO: 1408 - DNA, 25 bp, Artificial Sequence
  Probe
ggctgcgtgggtctgttttaacgtg

SEQ ID NO: 1409 - DNA, 25 bp, Artificial Sequence
  Probe
catgcagcattggcgctctggctgc

SEQ ID NO: 1410 - DNA, 25 bp, Artificial Sequence
  Probe
gcagcagctgagttgctcaaggcca

SEQ ID NO: 1411 - DNA, 25 bp, Artificial Sequence
  Probe
gctcaaggccagtgtccaagtggac

SEQ ID NO: 1412 - DNA, 25 bp, Artificial Sequence
  Probe
caaggtcatccctgagctgaacggg

SEQ ID NO: 1413 - DNA, 25 bp, Artificial Sequence
  Probe
gtccccactgccaacgtgtcagtgg

SEQ ID NO: 1414 - DNA, 25 bp, Artificial Sequence
  Probe
gtgtcagtggtggacctgacctgcc

SEQ ID NO: 1415 - DNA, 25 bp, Artificial Sequence
  Probe
gacctgccgtctagaaaaacctgcc

SEQ ID NO: 1416 - DNA, 25 bp, Artificial Sequence
  Probe
acactgagcaccaggtggtctcctc

SEQ ID NO: 1417 - DNA, 25 bp, Artificial Sequence
  Probe
tctcctctgacttcaacagcgacac

SEQ ID NO: 1418 - DNA, 25 bp, Artificial Sequence
  Probe
tttgacgctggggctggcattgccc

SEQ ID NO: 1419 - DNA, 25 bp, Artificial Sequence
  Probe
cgaccactttgtcaagctcatttcc

SEQ ID NO: 1420 - DNA, 25 bp, Artificial Sequence
  Probe
gcaacagggtggtggacctcatggc

SEQ ID NO: 1421 - DNA, 25 bp, Artificial Sequence
  Probe
tcctcacagttgccatgtagacccc

SEQ ID NO: 1422 - DNA, 25 bp, Artificial Sequence
  Probe
cgcaccttgtcatgtaccatcaata

SEQ ID NO: 1423 - DNA, 25 bp, Artificial Sequence
  Probe
caaggtcatccctgagctgaacggg

SEQ ID NO: 1424 - DNA, 25 bp, Artificial Sequence
  Probe
gtgtcagtggtggacctgacctgcc

SEQ ID NO: 1425 - DNA, 25 bp, Artificial Sequence
  Probe
gacctgccgtctagaaaaacctgcc

SEQ ID NO: 1426 - DNA, 25 bp, Artificial Sequence
  Probe
tggtgaagcaggcgtcggagggccc

SEQ ID NO: 1427 - DNA, 25 bp, Artificial Sequence
  Probe
acactgagcaccaggtggtctcctc

SEQ ID NO: 1428 - DNA, 25 bp, Artificial Sequence
  Probe
tctcctctgacttcaacagcgacac

SEQ ID NO: 1429 - DNA, 25 bp, Artificial Sequence
  Probe
tttgacgctggggctggcattgccc

SEQ ID NO: 1430 - DNA, 25 bp, Artificial Sequence
  Probe
cgaccactttgtcaagctcatttcc

SEQ ID NO: 1431 - DNA, 25 bp, Artificial Sequence
  Probe
gcaacagggtggtggacctcatggc

SEQ ID NO: 1432 - DNA, 25 bp, Artificial Sequence
  Probe
gcctccaaggagtaagacccctgga

SEQ ID NO: 1433 - DNA, 25 bp, Artificial Sequence
  Probe
ccctccgggaaactgtggcgtgatg

SEQ ID NO: 1434 - DNA, 25 bp, Artificial Sequence
  Probe
cgaccactttgtcaagctcatttcc

SEQ ID NO: 1435 - DNA, 25 bp, Artificial Sequence
  Probe
caacgaatttggccacactcagtcc

SEQ ID NO: 1436 - DNA, 25 bp, Artificial Sequence
  Probe
tcctcacagttgccatgtagacccc

SEQ ID NO: 1437 - DNA, 25 bp, Artificial Sequence
  Probe
cgcaccttgtcatgtaccatcaata

SEQ ID NO: 1438 - DNA, 25 bp, Artificial Sequence
  Probe
ggactcatgaccacagtccatgcca

SEQ ID NO: 1439 - DNA, 25 bp, Artificial Sequence
  Probe
ccctccgggaaactgtggcgtgatg

SEQ ID NO: 1440 - DNA, 25 bp, Artificial Sequence
  Probe
caaggtcatccctgagctgaacggg

SEQ ID NO: 1441 - DNA, 25 bp, Artificial Sequence
  Probe
cactgccaacgtgtcggtggtggac

SEQ ID NO: 1442 - DNA, 25 bp, Artificial Sequence
  Probe
gacctgccgtctagaaaaacctgcc

SEQ ID NO: 1443 - DNA, 25 bp, Artificial Sequence
  Probe
acactgagcaccaggtggtctcctc

SEQ ID NO: 1444 - DNA, 25 bp, Artificial Sequence
  Probe
tctcctctgacttcaacagcgacac

SEQ ID NO: 1445 - DNA, 25 bp, Artificial Sequence
  Probe
tcatttcctggtatgacaacgaatt

SEQ ID NO: 1446 - DNA, 25 bp, Artificial Sequence
  Probe
acaacgaatttggctacagcaacag

SEQ ID NO: 1447 - DNA, 25 bp, Artificial Sequence
  Probe
gggtggtggacctcatggcccacat

SEQ ID NO: 1448 - DNA, 25 bp, Artificial Sequence
  Probe
tcatggcccacatggcctccaagga

SEQ ID NO: 1449 - DNA, 25 bp, Artificial Sequence
  Probe
acatggcctccaaggagtaagaccc

SEQ ID NO: 1450 - DNA, 25 bp, Artificial Sequence
  Probe
aggagtaagacccctggaccaccag

SEQ ID NO: 1451 - DNA, 25 bp, Artificial Sequence
  Probe
gccccagcaagagcacaagaggaag

SEQ ID NO: 1452 - DNA, 25 bp, Artificial Sequence
  Probe
gagagagaccctcactgctggggag

SEQ ID NO: 1453 - DNA, 25 bp, Artificial Sequence
  Probe
cctcactgctggggagtccctgcca

SEQ ID NO: 1454 - DNA, 25 bp, Artificial Sequence
  Probe
cctcctcacagttgccatgtagacc

SEQ ID NO: 1455 - DNA, 25 bp, Artificial Sequence
  Probe
agttgccatgtagaccccttgaaga

SEQ ID NO: 1456 - DNA, 25 bp, Artificial Sequence
  Probe
catgtagaccccttgaagaggggag

SEQ ID NO: 1457 - DNA, 25 bp, Artificial Sequence
  Probe
tagggagccgcaccttgtcatgtac

SEQ ID NO: 1458 - DNA, 25 bp, Artificial Sequence
  Probe
gccgcaccttgtcatgtaccatcaa

SEQ ID NO: 1459 - DNA, 25 bp, Artificial Sequence
  Probe
tgtcatgtaccatcaataaagtacc

SEQ ID NO: 1460 - DNA, 25 bp, Artificial Sequence
  Probe
cctctgacttcaacagcgacaccca

SEQ ID NO: 1461 - DNA, 25 bp, Artificial Sequence
  Probe
gggctggcattgccctcaacgacca

SEQ ID NO: 1462 - DNA, 25 bp, Artificial Sequence
  Probe
ccctcaacgaccactttgtcaagct

SEQ ID NO: 1463 - DNA, 25 bp, Artificial Sequence
  Probe
accactttgtcaagctcatttcctg

SEQ ID NO: 1464 - DNA, 25 bp, Artificial Sequence
  Probe
ttgtcaagctcatttcctggtatga

SEQ ID NO: 1465 - DNA, 25 bp, Artificial Sequence
  Probe
tcatttcctggtatgacaacgaatt

SEQ ID NO: 1466 - DNA, 25 bp, Artificial Sequence
  Probe
acaacgaatttggctacagcaacag

SEQ ID NO: 1467 - DNA, 25 bp, Artificial Sequence
  Probe
gggtggtggacctcatggcccacat

SEQ ID NO: 1468 - DNA, 25 bp, Artificial Sequence
  Probe
tcatggcccacatggcctccaagga

SEQ ID NO: 1469 - DNA, 25 bp, Artificial Sequence
  Probe
acatggcctccaaggagtaagaccc

SEQ ID NO: 1470 - DNA, 25 bp, Artificial Sequence
  Probe
aggagtaagacccctggaccaccag

SEQ ID NO: 1471 - DNA, 25 bp, Artificial Sequence
  Probe
gccccagcaagagcacaagaggaag

SEQ ID NO: 1472 - DNA, 25 bp, Artificial Sequence
  Probe
gagagagaccctcactgctggggag

SEQ ID NO: 1473 - DNA, 25 bp, Artificial Sequence
  Probe
cctcactgctggggagtccctgcca

SEQ ID NO: 1474 - DNA, 25 bp, Artificial Sequence
  Probe
cctcctcacagttgccatgtagacc

SEQ ID NO: 1475 - DNA, 25 bp, Artificial Sequence
  Probe
agttgccatgtagaccccttgaaga

SEQ ID NO: 1476 - DNA, 25 bp, Artificial Sequence
  Probe
catgtagaccccttgaagaggggag

SEQ ID NO: 1477 - DNA, 25 bp, Artificial Sequence
  Probe
tagggagccgcaccttgtcatgtac

SEQ ID NO: 1478 - DNA, 25 bp, Artificial Sequence
  Probe
gccgcaccttgtcatgtaccatcaa

SEQ ID NO: 1479 - DNA, 25 bp, Artificial Sequence
  Probe
tgtcatgtaccatcaataaagtacc

SEQ ID NO: 1480 - DNA, 25 bp, Artificial Sequence
  Probe
cctctgacttcaacagcgacaccca

SEQ ID NO: 1481 - DNA, 25 bp, Artificial Sequence
  Probe
gggctggcattgccctcaacgacca

SEQ ID NO: 1482 - DNA, 25 bp, Artificial Sequence
  Probe
ccctcaacgaccactttgtcaagct

SEQ ID NO: 1483 - DNA, 25 bp, Artificial Sequence
  Probe
accactttgtcaagctcatttcctg

SEQ ID NO: 1484 - DNA, 25 bp, Artificial Sequence
  Probe
ttgtcaagctcatttcctggtatga

SEQ ID NO: 1485 - DNA, 25 bp, Artificial Sequence
  Probe
gcgcctggtcaccagggctgctttt

SEQ ID NO: 1486 - DNA, 25 bp, Artificial Sequence
  Probe
ggtcaccagggctgcttttaactct

SEQ ID NO: 1487 - DNA, 25 bp, Artificial Sequence
  Probe
tgcttttaactctggtaaagtggat

SEQ ID NO: 1488 - DNA, 25 bp, Artificial Sequence
  Probe
ggatattgttgccatcaatgacccc

SEQ ID NO: 1489 - DNA, 25 bp, Artificial Sequence
  Probe
catcaatgaccccttcattgacctc

SEQ ID NO: 1490 - DNA, 25 bp, Artificial Sequence
  Probe
cttcattgacctcaactacatggtt

SEQ ID NO: 1491 - DNA, 25 bp, Artificial Sequence
  Probe
caactacatggtttacatgttccaa

SEQ ID NO: 1492 - DNA, 25 bp, Artificial Sequence
  Probe
ggtttacatgttccaatatgattcc

SEQ ID NO: 1493 - DNA, 25 bp, Artificial Sequence
  Probe
ccaatatgattccacccatggcaaa

SEQ ID NO: 1494 - DNA, 25 bp, Artificial Sequence
  Probe
tgattccacccatggcaaattccat

SEQ ID NO: 1495 - DNA, 25 bp, Artificial Sequence
  Probe
attccatggcaccgtcaaggctgag

SEQ ID NO: 1496 - DNA, 25 bp, Artificial Sequence
  Probe
tggcaccgtcaaggctgagaacggg

SEQ ID NO: 1497 - DNA, 25 bp, Artificial Sequence
  Probe
catcaatggaaatcccatcaccatc

SEQ ID NO: 1498 - DNA, 25 bp, Artificial Sequence
  Probe
tcccatcaccatcttccaggagcga

SEQ ID NO: 1499 - DNA, 25 bp, Artificial Sequence
  Probe
cttccaggagcgagatccctccaaa

SEQ ID NO: 1500 - DNA, 25 bp, Artificial Sequence
  Probe
gcgagatccctccaaaatcaagtgg

SEQ ID NO: 1501 - DNA, 25 bp, Artificial Sequence
  Probe
cgatgctggcgctgagtacgtcgtg

SEQ ID NO: 1502 - DNA, 25 bp, Artificial Sequence
  Probe
cgtggagtccactggcgtcttcacc

SEQ ID NO: 1503 - DNA, 25 bp, Artificial Sequence
  Probe
cttcaccaccatggagaaggctggg

SEQ ID NO: 1504 - DNA, 25 bp, Artificial Sequence
  Probe
cggatttggtcgtattgggcgcctg

SEQ ID NO: 1505 - DNA, 25 bp, Artificial Sequence
  Probe
gcgcctggtcaccagggctgctttt

SEQ ID NO: 1506 - DNA, 25 bp, Artificial Sequence
  Probe
ggtcaccagggctgcttttaactct

SEQ ID NO: 1507 - DNA, 25 bp, Artificial Sequence
  Probe
tgcttttaactctggtaaagtggat

SEQ ID NO: 1508 - DNA, 25 bp, Artificial Sequence
  Probe
ggatattgttgccatcaatgacccc

SEQ ID NO: 1509 - DNA, 25 bp, Artificial Sequence
  Probe
catcaatgaccccttcattgacctc

SEQ ID NO: 1510 - DNA, 25 bp, Artificial Sequence
  Probe
cttcattgacctcaactacatggtt

SEQ ID NO: 1511 - DNA, 25 bp, Artificial Sequence
  Probe
caactacatggtttacatgttccaa

SEQ ID NO: 1512 - DNA, 25 bp, Artificial Sequence
  Probe
ggtttacatgttccaatatgattcc

SEQ ID NO: 1513 - DNA, 25 bp, Artificial Sequence
  Probe
ccaatatgattccacccatggcaaa

SEQ ID NO: 1514 - DNA, 25 bp, Artificial Sequence
  Probe
tgattccacccatggcaaattccat

SEQ ID NO: 1515 - DNA, 25 bp, Artificial Sequence
  Probe
attccatggcaccgtcaaggctgag

SEQ ID NO: 1516 - DNA, 25 bp, Artificial Sequence
  Probe
tggcaccgtcaaggctgagaacggg

SEQ ID NO: 1517 - DNA, 25 bp, Artificial Sequence
  Probe
catcaatggaaatcccatcaccatc

SEQ ID NO: 1518 - DNA, 25 bp, Artificial Sequence
  Probe
tcccatcaccatcttccaggagcga

SEQ ID NO: 1519 - DNA, 25 bp, Artificial Sequence
  Probe
cttccaggagcgagatccctccaaa

SEQ ID NO: 1520 - DNA, 25 bp, Artificial Sequence
  Probe
gcgagatccctccaaaatcaagtgg

SEQ ID NO: 1521 - DNA, 25 bp, Artificial Sequence
  Probe
cgatgctggcgctgagtacgtcgtg

SEQ ID NO: 1522 - DNA, 25 bp, Artificial Sequence
  Probe
cgtggagtccactggcgtcttcacc

SEQ ID NO: 1523 - DNA, 25 bp, Artificial Sequence
  Probe
cttcaccaccatggagaaggctggg

SEQ ID NO: 1524 - DNA, 25 bp, Artificial Sequence
  Probe
cggatttggtcgtattgggcgcctg

SEQ ID NO: 1525 - DNA, 25 bp, Artificial Sequence
  Probe
aagatcatcagcaatgcctcctgca

SEQ ID NO: 1526 - DNA, 25 bp, Artificial Sequence
  Probe
accaactgcttagcacccctggcca

SEQ ID NO: 1527 - DNA, 25 bp, Artificial Sequence
  Probe
ttagcacccctggccaaggtcatcc

SEQ ID NO: 1528 - DNA, 25 bp, Artificial Sequence
  Probe
gacaactttggtatcgtggaaggac

SEQ ID NO: 1529 - DNA, 25 bp, Artificial Sequence
  Probe
gtggaaggactcatgaccacagtcc

SEQ ID NO: 1530 - DNA, 25 bp, Artificial Sequence
  Probe
atcactgccacccagaagactgtgg

SEQ ID NO: 1531 - DNA, 25 bp, Artificial Sequence
  Probe
gccacccagaagactgtggatggcc

SEQ ID NO: 1532 - DNA, 25 bp, Artificial Sequence
  Probe
ccctccgggaaactgtggcgtgatg

SEQ ID NO: 1533 - DNA, 25 bp, Artificial Sequence
  Probe
ggccgcggggctctccagaacatca

SEQ ID NO: 1534 - DNA, 25 bp, Artificial Sequence
  Probe
gcctctactggcgctgccaaggctg

SEQ ID NO: 1535 - DNA, 25 bp, Artificial Sequence
  Probe
gtgggcaaggtcatccctgagctga

SEQ ID NO: 1536 - DNA, 25 bp, Artificial Sequence
  Probe
gtcatccctgagctgaacgggaagc

SEQ ID NO: 1537 - DNA, 25 bp, Artificial Sequence
  Probe
gagctgaacgggaagctcactggca

SEQ ID NO: 1538 - DNA, 25 bp, Artificial Sequence
  Probe
aagctcactggcatggccttccgtg

SEQ ID NO: 1539 - DNA, 25 bp, Artificial Sequence
  Probe
actggcatggccttccgtgtcccca

SEQ ID NO: 1540 - DNA, 25 bp, Artificial Sequence
  Probe
actgccaacgtgtcagtggtggacc

SEQ ID NO: 1541 - DNA, 25 bp, Artificial Sequence
  Probe
aacgtgtcagtggtggacctgacct

SEQ ID NO: 1542 - DNA, 25 bp, Artificial Sequence
  Probe
gtggacctgacctgccgtctagaaa

SEQ ID NO: 1543 - DNA, 25 bp, Artificial Sequence
  Probe
ctgacctgccgtctagaaaaacctg

SEQ ID NO: 1544 - DNA, 25 bp, Artificial Sequence
  Probe
gaaaaacctgccaaatatgatgaca

SEQ ID NO: 1545 - DNA, 25 bp, Artificial Sequence
  Probe
aagatcatcagcaatgcctcctgca

SEQ ID NO: 1546 - DNA, 25 bp, Artificial Sequence
  Probe
accaactgcttagcacccctggcca

SEQ ID NO: 1547 - DNA, 25 bp, Artificial Sequence
  Probe
ttagcacccctggccaaggtcatcc

SEQ ID NO: 1548 - DNA, 25 bp, Artificial Sequence
  Probe
gacaactttggtatcgtggaaggac

SEQ ID NO: 1549 - DNA, 25 bp, Artificial Sequence
  Probe
gtggaaggactcatgaccacagtcc

SEQ ID NO: 1550 - DNA, 25 bp, Artificial Sequence
  Probe
atcactgccacccagaagactgtgg

SEQ ID NO: 1551 - DNA, 25 bp, Artificial Sequence
  Probe
gccacccagaagactgtggatggcc

SEQ ID NO: 1552 - DNA, 25 bp, Artificial Sequence
  Probe
ccctccgggaaactgtggcgtgatg

SEQ ID NO: 1553 - DNA, 25 bp, Artificial Sequence
  Probe
ggccgcggggctctccagaacatca

SEQ ID NO: 1554 - DNA, 25 bp, Artificial Sequence
  Probe
gcctctactggcgctgccaaggctg

SEQ ID NO: 1555 - DNA, 25 bp, Artificial Sequence
  Probe
gtgggcaaggtcatccctgagctga

SEQ ID NO: 1556 - DNA, 25 bp, Artificial Sequence
  Probe
gtcatccctgagctgaacgggaagc

SEQ ID NO: 1557 - DNA, 25 bp, Artificial Sequence
  Probe
gagctgaacgggaagctcactggca

SEQ ID NO: 1558 - DNA, 25 bp, Artificial Sequence
  Probe
aagctcactggcatggccttccgtg

SEQ ID NO: 1559 - DNA, 25 bp, Artificial Sequence
  Probe
actggcatggccttccgtgtcccca

SEQ ID NO: 1560 - DNA, 25 bp, Artificial Sequence
  Probe
actgccaacgtgtcagtggtggacc

SEQ ID NO: 1561 - DNA, 25 bp, Artificial Sequence
  Probe
aacgtgtcagtggtggacctgacct

SEQ ID NO: 1562 - DNA, 25 bp, Artificial Sequence
  Probe
gtggacctgacctgccgtctagaaa

SEQ ID NO: 1563 - DNA, 25 bp, Artificial Sequence
  Probe
ctgacctgccgtctagaaaaacctg

SEQ ID NO: 1564 - DNA, 25 bp, Artificial Sequence
  Probe
gaaaaacctgccaaatatgatgaca

SEQ ID NO: 1565 - DNA, 25 bp, Artificial Sequence
  Probe
cgatccttggagatcccgtaatccc

SEQ ID NO: 1566 - DNA, 25 bp, Artificial Sequence
  Probe
tttggagcctgatttcctactgact

SEQ ID NO: 1567 - DNA, 25 bp, Artificial Sequence
  Probe
tttcctactgacttccaatttagtg

SEQ ID NO: 1568 - DNA, 25 bp, Artificial Sequence
  Probe
tgctcccccagtatgctaaatagaa

SEQ ID NO: 1569 - DNA, 25 bp, Artificial Sequence
  Probe
aatagaaagccctctgcaatatatt

SEQ ID NO: 1570 - DNA, 25 bp, Artificial Sequence
  Probe
gattatttactttctcttatctttt

SEQ ID NO: 1571 - DNA, 25 bp, Artificial Sequence
  Probe
ttatcttttccttagtgttcctcaa

SEQ ID NO: 1572 - DNA, 25 bp, Artificial Sequence
  Probe
aaattatatctatcctctaaaccag

SEQ ID NO: 1573 - DNA, 25 bp, Artificial Sequence
  Probe
agggatcagcaaactataaccccca

SEQ ID NO: 1574 - DNA, 25 bp, Artificial Sequence
  Probe
actcatttgtttacctactatctat

SEQ ID NO: 1575 - DNA, 25 bp, Artificial Sequence
  Probe
tgacatggaccataggccctaaaga

SEQ ID NO: 1576 - DNA, 25 bp, Artificial Sequence
  Probe
gagtaggcatctttaatcgccctga

SEQ ID NO: 1577 - DNA, 25 bp, Artificial Sequence
  Probe
gcctgagagggcctgactgaaaagt

SEQ ID NO: 1578 - DNA, 25 bp, Artificial Sequence
  Probe
tctgtagtttctacacccaagccac

SEQ ID NO: 1579 - DNA, 25 bp, Artificial Sequence
  Probe
cacccaagccactgaagtcatctgt

SEQ ID NO: 1580 - DNA, 25 bp, Artificial Sequence
  Probe
aatatttgatttgttgacatcccaa

SEQ ID NO: 1581 - DNA, 25 bp, Artificial Sequence
  Probe
acatgttttgcttggttctatagta

SEQ ID NO: 1582 - DNA, 25 bp, Artificial Sequence
  Probe
gttacttaggatctatttaccatat

SEQ ID NO: 1583 - DNA, 25 bp, Artificial Sequence
  Probe
gtatgagaaatcctcacccaagcat

SEQ ID NO: 1584 - DNA, 25 bp, Artificial Sequence
  Probe
tcacccaagcattcaacctaaatct

SEQ ID NO: 1585 - DNA, 25 bp, Artificial Sequence
  Probe
ttgggtgctgtctttagtaactttt

SEQ ID NO: 1586 - DNA, 25 bp, Artificial Sequence
  Probe
tgaactttatgaacccatactttta

SEQ ID NO: 1587 - DNA, 25 bp, Artificial Sequence
  Probe
gatgcacgtggtgggaaccctgagc

SEQ ID NO: 1588 - DNA, 25 bp, Artificial Sequence
  Probe
aagccattcttgattggacctcata

SEQ ID NO: 1589 - DNA, 25 bp, Artificial Sequence
  probe
aagccattcttgattggacctcata

SEQ ID NO: 1590 - DNA, 25 bp, Artificial Sequence
  probe
ttcatttagaagcccctctgtacag

SEQ ID NO: 1591 - DNA, 25 bp, Artificial Sequence
  probe
aaagcagccacagttatgtaggtct

SEQ ID NO: 1592 - DNA, 25 bp, Artificial Sequence
  probe
agtgacaggacattgccaccaactc

SEQ ID NO: 1593 - DNA, 25 bp, Artificial Sequence
  probe
aactctatcctactaccatcaatgt

SEQ ID NO: 1594 - DNA, 25 bp, Artificial Sequence
  probe
gttctcatttcctactattcatgct

SEQ ID NO: 1595 - DNA, 25 bp, Artificial Sequence
  probe
ttggtcaaggcctgaaagcacccag

SEQ ID NO: 1596 - DNA, 25 bp, Artificial Sequence
  probe
ccaggtgcagaatatcttgcgccag

SEQ ID NO: 1597 - DNA, 25 bp, Artificial Sequence
  probe
gaatacactcgtaatacccttaaag

SEQ ID NO: 1598 - DNA, 25 bp, Artificial Sequence
  probe
tctctgtctcaggcagggcatcatt

SEQ ID NO: 1599 - DNA, 25 bp, Artificial Sequence
  probe
gggcatcattcagtaattagctcaa

SEQ ID NO: 1600 - DNA, 25 bp, Artificial Sequence
  probe
caaacaaaacatctcaagtccccaa

SEQ ID NO: 1601 - DNA, 25 bp, Artificial Sequence
  probe
tcccaccgcccggatggggtagaat

SEQ ID NO: 1602 - DNA, 25 bp, Artificial Sequence
  probe
agggatggaggctttacggccactt

SEQ ID NO: 1603 - DNA, 25 bp, Artificial Sequence
  probe
aaaactctcgattgccgtttcaatt

SEQ ID NO: 1604 - DNA, 25 bp, Artificial Sequence
  probe
ccgtttcaattgtggaccggcgccg

SEQ ID NO: 1605 - DNA, 25 bp, Artificial Sequence
  probe
gacttcgcccggtggcaatagttcc

SEQ ID NO: 1606 - DNA, 25 bp, Artificial Sequence
  probe
gttccgggagaattggccattggta

SEQ ID NO: 1607 - DNA, 25 bp, Artificial Sequence
  probe
gacttcatagggtcactggaatgct

SEQ ID NO: 1608 - DNA, 25 bp, Artificial Sequence
  probe
ggggcgggaggtgacatcatgaagt

SEQ ID NO: 1609 - DNA, 25 bp, Artificial Sequence
  probe
ttattgggcaggttcgagatgttct

SEQ ID NO: 1610 - DNA, 25 bp, Artificial Sequence
  probe
gatgttctgctatttactctgtggt

SEQ ID NO: 1611 - DNA, 25 bp, Artificial Sequence
  probe
aatgcctcattgttagaactactac

SEQ ID NO: 1612 - DNA, 25 bp, Artificial Sequence
  probe
gaactactactcacagttaccactt

SEQ ID NO: 1613 - DNA, 25 bp, Artificial Sequence
  probe
ctcacagttaccacttggggtcagt

SEQ ID NO: 1614 - DNA, 25 bp, Artificial Sequence
  probe
aaaatgggcataatagtttacctca

SEQ ID NO: 1615 - DNA, 25 bp, Artificial Sequence
  probe
gtgaggacactaagattcccatata

SEQ ID NO: 1616 - DNA, 25 bp, Artificial Sequence
  probe
gcggtagttgatgggagctgttgaa

SEQ ID NO: 1617 - DNA, 25 bp, Artificial Sequence
  probe
ggtaaacagcattctagcaatcctt

SEQ ID NO: 1618 - DNA, 25 bp, Artificial Sequence
  probe
gcaatccttcgacttttgtgatagc

SEQ ID NO: 1619 - DNA, 25 bp, Artificial Sequence
  probe
ggacatccacaattcaatgtataac

SEQ ID NO: 1620 - DNA, 25 bp, Artificial Sequence
  probe
gaactacgcggagcgagtgggcgcc

SEQ ID NO: 1621 - DNA, 25 bp, Artificial Sequence
  probe
tgtacctggcggcggtgttggagta

SEQ ID NO: 1622 - DNA, 25 bp, Artificial Sequence
  probe
ttacggcggagatcctggagctggc

SEQ ID NO: 1623 - DNA, 25 bp, Artificial Sequence
  probe
agaagaccaggataattccccgcca

SEQ ID NO: 1624 - DNA, 25 bp, Artificial Sequence
  probe
ctcgccatccgcaacgacgaggagt

SEQ ID NO: 1625 - DNA, 25 bp, Artificial Sequence
  probe
gctgggcaaagtgaccatcgctcag

SEQ ID NO: 1626 - DNA, 25 bp, Artificial Sequence
  probe
gtgctgctgcccaagaagacggaga

SEQ ID NO: 1627 - DNA, 25 bp, Artificial Sequence
  probe
cccccagcaaaggcccttttcatgg

SEQ ID NO: 1628 - DNA, 25 bp, Artificial Sequence
  probe
gtcgtcccgcaatgcttttgaatgt

SEQ ID NO: 1629 - DNA, 25 bp, Artificial Sequence
  probe
gtgctggatgtcatggagggccggt

SEQ ID NO: 1630 - DNA, 25 bp, Artificial Sequence
  probe
gacatctagcggggaggtgggcggc

SEQ ID NO: 1631 - DNA, 25 bp, Artificial Sequence
  probe
gtgatcatgtccggtcgcgggaaac

SEQ ID NO: 1632 - DNA, 25 bp, Artificial Sequence
  probe
gaactacgcggagcgagtgggcgcc

SEQ ID NO: 1633 - DNA, 25 bp, Artificial Sequence
  probe
tgtacctggcggcggtgttggagta

SEQ ID NO: 1634 - DNA, 25 bp, Artificial Sequence
  probe
ttacggcggagatcctggagctggc

SEQ ID NO: 1635 - DNA, 25 bp, Artificial Sequence
  probe
agaagaccaggataattccccgcca

SEQ ID NO: 1636 - DNA, 25 bp, Artificial Sequence
  probe
ctcgccatccgcaacgacgaggagt

SEQ ID NO: 1637 - DNA, 25 bp, Artificial Sequence
  probe
gctgggcaaagtgaccatcgctcag

SEQ ID NO: 1638 - DNA, 25 bp, Artificial Sequence
  probe
gtgctgctgcccaagaagacggaga

SEQ ID NO: 1639 - DNA, 25 bp, Artificial Sequence
  probe
gtcgtcccgcaatgcttttgaatgt

SEQ ID NO: 1640 - DNA, 25 bp, Artificial Sequence
  probe
gtgctggatgtcatggagggccggt

SEQ ID NO: 1641 - DNA, 25 bp, Artificial Sequence
  probe
gacatctagcggggaggtgggcggc

SEQ ID NO: 1642 - DNA, 25 bp, Artificial Sequence
  probe
tccccgaggactggtctgtttagtt

SEQ ID NO: 1643 - DNA, 25 bp, Artificial Sequence
  probe
gaggactggtctgtttagttgtgcc

SEQ ID NO: 1644 - DNA, 25 bp, Artificial Sequence
  probe
aaaaggcttagtcaggccccataat

SEQ ID NO: 1645 - DNA, 25 bp, Artificial Sequence
  probe
tatgcaaacttcacaatgccccttc

SEQ ID NO: 1646 - DNA, 25 bp, Artificial Sequence
  probe
caatgccccttccagtggttgaaag

SEQ ID NO: 1647 - DNA, 25 bp, Artificial Sequence
  probe
ggttgaaaggtcgcataccatgctg

SEQ ID NO: 1648 - DNA, 25 bp, Artificial Sequence
  probe
gtgtaagaactttagctctctgcaa

SEQ ID NO: 1649 - DNA, 25 bp, Artificial Sequence
  probe
ttagctctctgcaatgagacttaaa

SEQ ID NO: 1650 - DNA, 25 bp, Artificial Sequence
  probe
aaattcagattcactctactcctta

SEQ ID NO: 1651 - DNA, 25 bp, Artificial Sequence
  probe
ctctactccttattagttatctgat

SEQ ID NO: 1652 - DNA, 25 bp, Artificial Sequence
  probe
gaaacttaatctctttaaacctcag

SEQ ID NO: 1653 - DNA, 25 bp, Artificial Sequence
  probe
cttctgactgcacttgttctcatag

SEQ ID NO: 1654 - DNA, 25 bp, Artificial Sequence
  probe
atgctatgcgcatttataccttgca

SEQ ID NO: 1655 - DNA, 25 bp, Artificial Sequence
  probe
taccttgcataagtcctcattctac

SEQ ID NO: 1656 - DNA, 25 bp, Artificial Sequence
  probe
ctcattctaccacatgttaaccctc

SEQ ID NO: 1657 - DNA, 25 bp, Artificial Sequence
  probe
gttaaccctctagctgataatgcaa

SEQ ID NO: 1658 - DNA, 25 bp, Artificial Sequence
  probe
aacgagttattcacaccagcatcat

SEQ ID NO: 1659 - DNA, 25 bp, Artificial Sequence
  probe
cattgtgttgtgtggttggtctcat

SEQ ID NO: 1660 - DNA, 25 bp, Artificial Sequence
  probe
actaggttgagtttttctcctctgc

SEQ ID NO: 1661 - DNA, 25 bp, Artificial Sequence
  probe
cagtaccgaagttctttttcttgtg

SEQ ID NO: 1662 - DNA, 25 bp, Artificial Sequence
  probe
gggaggagcacaaaactccagccca

SEQ ID NO: 1663 - DNA, 25 bp, Artificial Sequence
  probe
cccactgaacctctgccaattaaga

SEQ ID NO: 1664 - DNA, 25 bp, Artificial Sequence
  probe
gttggtgagggagatcgcgcaggat

SEQ ID NO: 1665 - DNA, 25 bp, Artificial Sequence
  probe
ccgacctgaggtttcagagcgcagc

SEQ ID NO: 1666 - DNA, 25 bp, Artificial Sequence
  probe
atcggtgcgctgcaggaggctagcg

SEQ ID NO: 1667 - DNA, 25 bp, Artificial Sequence
  probe
gggtctgttcgaagataccaacctg

SEQ ID NO: 1668 - DNA, 25 bp, Artificial Sequence
  probe
tgtgccatccacgctaagagagtca

SEQ ID NO: 1669 - DNA, 25 bp, Artificial Sequence
  probe
cgctaagagagtcaccatcatgccc

SEQ ID NO: 1670 - DNA, 25 bp, Artificial Sequence
  probe
cccaaagacatccagttggctcgcc

SEQ ID NO: 1671 - DNA, 25 bp, Artificial Sequence
  probe
ttggctcgccggatacggggagaga

SEQ ID NO: 1672 - DNA, 25 bp, Artificial Sequence
  probe
gaaggcagtttttatggcgttttgt

SEQ ID NO: 1673 - DNA, 25 bp, Artificial Sequence
  probe
agggatgggtgatacttcttgcttc

SEQ ID NO: 1674 - DNA, 25 bp, Artificial Sequence
  probe
atgtgtacagggtccttttgcaata

SEQ ID NO: 1675 - DNA, 25 bp, Artificial Sequence
  probe
agccctactcatggggacattcagg

SEQ ID NO: 1676 - DNA, 25 bp, Artificial Sequence
  probe
ggaagtgggcgggggagcatccacc

SEQ ID NO: 1677 - DNA, 25 bp, Artificial Sequence
  probe
aagtgggtccattgaggtggccctg

SEQ ID NO: 1678 - DNA, 25 bp, Artificial Sequence
  probe
accccgaggctctaacaatgcactc

SEQ ID NO: 1679 - DNA, 25 bp, Artificial Sequence
  probe
aacaatgcactctgagatccctacc

SEQ ID NO: 1680 - DNA, 25 bp, Artificial Sequence
  probe
ctgactcgaggcacctaacatccat

SEQ ID NO: 1681 - DNA, 25 bp, Artificial Sequence
  probe
caacacaggccagcgacttctgggg

SEQ ID NO: 1682 - DNA, 25 bp, Artificial Sequence
  probe
catggtttgtcactgttgagcttct

SEQ ID NO: 1683 - DNA, 25 bp, Artificial Sequence
  probe
gagcttctgttcctagagaatccta

SEQ ID NO: 1684 - DNA, 25 bp, Artificial Sequence
  probe
tagaggcttgattggcccaggctgc

SEQ ID NO: 1685 - DNA, 25 bp, Artificial Sequence
  probe
gtagcgcaaggcctgacatgggtag

SEQ ID NO: 1686 - DNA, 25 bp, Artificial Sequence
  probe
actatagactcgaaggatccacaag

SEQ ID NO: 1687 - DNA, 25 bp, Artificial Sequence
  probe
accatcgaagcctccagtcattgag

SEQ ID NO: 1688 - DNA, 25 bp, Artificial Sequence
  probe
gaagcctccagtcattgaggggctg

SEQ ID NO: 1689 - DNA, 25 bp, Artificial Sequence
  probe
ctccagtcattgaggggctgagccc

SEQ ID NO: 1690 - DNA, 25 bp, Artificial Sequence
  probe
ctcgaaggatccacaagtttgtaca

SEQ ID NO: 1691 - DNA, 25 bp, Artificial Sequence
  probe
tgaggggctgagccccactgtttac

SEQ ID NO: 1692 - DNA, 25 bp, Artificial Sequence
  probe
gagccccactgtttacaggaatcca

SEQ ID NO: 1693 - DNA, 25 bp, Artificial Sequence
  probe
ttacaggaatccagagagtttcaag

SEQ ID NO: 1694 - DNA, 25 bp, Artificial Sequence
  probe
gcaggcttgtaaaacgacggccagt

SEQ ID NO: 1695 - DNA, 25 bp, Artificial Sequence
  probe
gacggccagtaactataacggtcct

SEQ ID NO: 1696 - DNA, 25 bp, Artificial Sequence
  probe
gccagtaactataacggtcctaagg

SEQ ID NO: 1697 - DNA, 25 bp, Artificial Sequence
  probe
ccggcccactctgaagtaatcttaa

SEQ ID NO: 1698 - DNA, 25 bp, Artificial Sequence
  probe
taagaagacgttaactcatttttct

SEQ ID NO: 1699 - DNA, 25 bp, Artificial Sequence
  probe
ttttcttgtgtattgtagacacttt

SEQ ID NO: 1700 - DNA, 25 bp, Artificial Sequence
  probe
tgtagacacttttggctgtctggta

SEQ ID NO: 1701 - DNA, 25 bp, Artificial Sequence
  probe
ggctgtctggtaacatggaaaatct

SEQ ID NO: 1702 - DNA, 25 bp, Artificial Sequence
  probe
acattacatgatttggtgagcctaa

SEQ ID NO: 1703 - DNA, 25 bp, Artificial Sequence
  probe
gtgagcctaattgctgttactaatt

SEQ ID NO: 1704 - DNA, 25 bp, Artificial Sequence
  probe
aatgtttcacgataactcagcaatt

SEQ ID NO: 1705 - DNA, 25 bp, Artificial Sequence
  probe
tcacgataactcagcaattgtaatg

SEQ ID NO: 1706 - DNA, 25 bp, Artificial Sequence
  probe
aacatctaatgtcttttgggttaca

SEQ ID NO: 1707 - DNA, 25 bp, Artificial Sequence
  probe
aacaggtactgagatttgtggccta

SEQ ID NO: 1708 - DNA, 25 bp, Artificial Sequence
  probe
aagcgcagccgcaaggagagctact

SEQ ID NO: 1709 - DNA, 25 bp, Artificial Sequence
  probe
gagagctactccgtatacgtgtaca

SEQ ID NO: 1710 - DNA, 25 bp, Artificial Sequence
  probe
caaggtgctgaagcaggtccacccc

SEQ ID NO: 1711 - DNA, 25 bp, Artificial Sequence
  probe
gcatctcctctaaggccatgggaat

SEQ ID NO: 1712 - DNA, 25 bp, Artificial Sequence
  probe
tgggaatcatgaactccttcgtcaa

SEQ ID NO: 1713 - DNA, 25 bp, Artificial Sequence
  probe
tcgtcaacgacatcttcgaacgcat

SEQ ID NO: 1714 - DNA, 25 bp, Artificial Sequence
  probe
tcgaacgcatcgcaggtgaggcttc

SEQ ID NO: 1715 - DNA, 25 bp, Artificial Sequence
  probe
gcattacaacaagcgctcgaccatc

SEQ ID NO: 1716 - DNA, 25 bp, Artificial Sequence
  probe
tcgaccatcacctccagggagatcc

SEQ ID NO: 1717 - DNA, 25 bp, Artificial Sequence
  probe
tcaccaagtacaccagcgctaagta

SEQ ID NO: 1718 - DNA, 25 bp, Artificial Sequence
  probe
gaaggacggcaggaagcgcaagcgc

SEQ ID NO: 1719 - DNA, 25 bp, Artificial Sequence
  probe
taaacttgccaaggagggactttct

SEQ ID NO: 1720 - DNA, 25 bp, Artificial Sequence
  probe
acaattgccttcggttacctcatta

SEQ ID NO: 1721 - DNA, 25 bp, Artificial Sequence
  probe
ggttacctcattatctactgcagaa

SEQ ID NO: 1722 - DNA, 25 bp, Artificial Sequence
  probe
gacgagaatgcaaccatacctagat

SEQ ID NO: 1723 - DNA, 25 bp, Artificial Sequence
  probe
acctagatggacttttccacaagct

SEQ ID NO: 1724 - DNA, 25 bp, Artificial Sequence
  probe
caagctaaagctggcctcttgatct

SEQ ID NO: 1725 - DNA, 25 bp, Artificial Sequence
  probe
tccattccttctctctaataatcat

SEQ ID NO: 1726 - DNA, 25 bp, Artificial Sequence
  probe
tactgttcctcaaagaattgtctac

SEQ ID NO: 1727 - DNA, 25 bp, Artificial Sequence
  probe
tctcctcttttgcctctgagaaaga

SEQ ID NO: 1728 - DNA, 25 bp, Artificial Sequence
  probe
gggtaatattctgtggtcctcagcc

SEQ ID NO: 1729 - DNA, 25 bp, Artificial Sequence
  probe
tcctcagccctgtaccttaataaat

SEQ ID NO: 1730 - DNA, 25 bp, Artificial Sequence
  probe
atggctcgtactaaacagacagctc

SEQ ID NO: 1731 - DNA, 25 bp, Artificial Sequence
  probe
gctaccaaaagtcgaccgagttgct

SEQ ID NO: 1732 - DNA, 25 bp, Artificial Sequence
  probe
agtcgaccgagttgctgattcggaa

SEQ ID NO: 1733 - DNA, 25 bp, Artificial Sequence
  probe
gttgctgattcggaagctgccgttc

SEQ ID NO: 1734 - DNA, 25 bp, Artificial Sequence
  probe
gaaatcgcccaagacttcaagaccg

SEQ ID NO: 1735 - DNA, 25 bp, Artificial Sequence
  probe
gcccaagacttcaagaccgatcttc

SEQ ID NO: 1736 - DNA, 25 bp, Artificial Sequence
  probe
cagacagctcggaaatccaccggcg

SEQ ID NO: 1737 - DNA, 25 bp, Artificial Sequence
  probe
ggaggcttgtgaggcctacttggta

SEQ ID NO: 1738 - DNA, 25 bp, Artificial Sequence
  probe
tgaggacacaaacctttgcgccatc

SEQ ID NO: 1739 - DNA, 25 bp, Artificial Sequence
  probe
cgagtgactattatgcccaaagaca

SEQ ID NO: 1740 - DNA, 25 bp, Artificial Sequence
  probe
aatccaccggcggtaaagcgccacg

SEQ ID NO: 1741 - DNA, 25 bp, Artificial Sequence
  probe
gagtctcttaatagggccattgtca

SEQ ID NO: 1742 - DNA, 25 bp, Artificial Sequence
  probe
acaggtgaccttgggccgagatttt

SEQ ID NO: 1743 - DNA, 25 bp, Artificial Sequence
  probe
acttctggcggctgcctggaaattg

SEQ ID NO: 1744 - DNA, 25 bp, Artificial Sequence
  probe
tggaaattgcctgcagccggtttac

SEQ ID NO: 1745 - DNA, 25 bp, Artificial Sequence
  probe
tagaaagccaaggggtctgcggtcc

SEQ ID NO: 1746 - DNA, 25 bp, Artificial Sequence
  probe
gtctgcggtccaaataggggcgggc

SEQ ID NO: 1747 - DNA, 25 bp, Artificial Sequence
  probe
gggctagataattaacttccctctg

SEQ ID NO: 1748 - DNA, 25 bp, Artificial Sequence
  probe
ttccctctggaccttcaaatacgtc

SEQ ID NO: 1749 - DNA, 25 bp, Artificial Sequence
  probe
gggctccactaaatgctagaacctc

SEQ ID NO: 1750 - DNA, 25 bp, Artificial Sequence
  probe
ggagggggacagaccatgcttttac

SEQ ID NO: 1751 - DNA, 25 bp, Artificial Sequence
  probe
aatgcgctggtgacacaccacttat

SEQ ID NO: 1752 - DNA, 25 bp, Artificial Sequence
  probe
aggctagaaaatcttgctgctccgt

SEQ ID NO: 1753 - DNA, 25 bp, Artificial Sequence
  probe
gctccgtcttagcattccaagagag

SEQ ID NO: 1754 - DNA, 25 bp, Artificial Sequence
  probe
agatagccctcagttctcaaatatt

SEQ ID NO: 1755 - DNA, 25 bp, Artificial Sequence
  probe
ttgtaacactagtctgtactccctt

SEQ ID NO: 1756 - DNA, 25 bp, Artificial Sequence
  probe
ttttccttccccaagactgatagga

SEQ ID NO: 1757 - DNA, 25 bp, Artificial Sequence
  probe
ggatgcaagctgaggtcgtggcaca

SEQ ID NO: 1758 - DNA, 25 bp, Artificial Sequence
  probe
gaatccccacctcagcgtgaggata

SEQ ID NO: 1759 - DNA, 25 bp, Artificial Sequence
  probe
taagccgtgcctcattatagccaca

SEQ ID NO: 1760 - DNA, 25 bp, Artificial Sequence
  probe
gattatacttctttgggtgctgtgc

SEQ ID NO: 1761 - DNA, 25 bp, Artificial Sequence
  probe
gaagttaacatgcctgacacagaca

SEQ ID NO: 1762 - DNA, 25 bp, Artificial Sequence
  probe
agataaaatactgccttctgccttt

SEQ ID NO: 1763 - DNA, 25 bp, Artificial Sequence
  probe
tgctgcctttcttcagatcaggtta

SEQ ID NO: 1764 - DNA, 25 bp, Artificial Sequence
  probe
cagatcaggttaccacaatgcctcc

SEQ ID NO: 1765 - DNA, 25 bp, Artificial Sequence
  probe
cccactttgccggtgctaaaacaca

SEQ ID NO: 1766 - DNA, 25 bp, Artificial Sequence
  probe
gaaagacaagctccgggtgtccagg

SEQ ID NO: 1767 - DNA, 25 bp, Artificial Sequence
  probe
tgacgggccaaccatgtggcaggtc

SEQ ID NO: 1768 - DNA, 25 bp, Artificial Sequence
  probe
gctccacagtggtcccactaatggg

SEQ ID NO: 1769 - DNA, 25 bp, Artificial Sequence
  probe
gggagagtgatactgcaccttcacc

SEQ ID NO: 1770 - DNA, 25 bp, Artificial Sequence
  probe
accttcacccgtaggactcatattt

SEQ ID NO: 1771 - DNA, 25 bp, Artificial Sequence
  probe
gtagcaaaaagcccttgtttctaga

SEQ ID NO: 1772 - DNA, 25 bp, Artificial Sequence
  probe
agtcctgtatcattgtatctcctat

SEQ ID NO: 1773 - DNA, 25 bp, Artificial Sequence
  probe
atctcctattctggattagtgcctt

SEQ ID NO: 1774 - DNA, 25 bp, Artificial Sequence
  probe
cccaccccgtggacgagaggctggg

SEQ ID NO: 1775 - DNA, 25 bp, Artificial Sequence
  probe
tggacgagaggctgggggtccaccc

SEQ ID NO: 1776 - DNA, 25 bp, Artificial Sequence
  probe
ttcgatgttcccatcttcactgaag

SEQ ID NO: 1777 - DNA, 25 bp, Artificial Sequence
  probe
ttcactgaagagttcttggaccaaa

SEQ ID NO: 1778 - DNA, 25 bp, Artificial Sequence
  probe
ggaccaaaacaaagcgcgtgaggcg

SEQ ID NO: 1779 - DNA, 25 bp, Artificial Sequence
  probe
tcggcgcttgcggaagatgaatgtg

SEQ ID NO: 1780 - DNA, 25 bp, Artificial Sequence
  probe
tgtggccttcgaggagcagaacgcg

SEQ ID NO: 1781 - DNA, 25 bp, Artificial Sequence
  probe
agaacgcggtactgcagaggcacac

SEQ ID NO: 1782 - DNA, 25 bp, Artificial Sequence
  probe
ccagcacgagaagctcatcgtccgc

SEQ ID NO: 1783 - DNA, 25 bp, Artificial Sequence
  probe
gctcatcgtccgcatcaaggaaatc

SEQ ID NO: 1784 - DNA, 25 bp, Artificial Sequence
  probe
gccagcgagcacctgtgaggagtgg

SEQ ID NO: 1785 - DNA, 25 bp, Artificial Sequence
  probe
taattctagttcagtgtcttaccct

SEQ ID NO: 1786 - DNA, 25 bp, Artificial Sequence
  probe
gttcagtgtcttaccctgaagagaa

SEQ ID NO: 1787 - DNA, 25 bp, Artificial Sequence
  probe
gagaaagttgtaggttggctgttga

SEQ ID NO: 1788 - DNA, 25 bp, Artificial Sequence
  probe
tggctgttgaaattcattccttaga

SEQ ID NO: 1789 - DNA, 25 bp, Artificial Sequence
  probe
gatatgatcagtttgattgcccggc

SEQ ID NO: 1790 - DNA, 25 bp, Artificial Sequence
  probe
ttgattgcccggctttattgccttt

SEQ ID NO: 1791 - DNA, 25 bp, Artificial Sequence
  probe
ggaatgtgatactcagggcttactc

SEQ ID NO: 1792 - DNA, 25 bp, Artificial Sequence
  probe
cagggcttactctatacaccaatga

SEQ ID NO: 1793 - DNA, 25 bp, Artificial Sequence
  probe
acaccaatgagtcttctttgatcct

SEQ ID NO: 1794 - DNA, 25 bp, Artificial Sequence
  probe
aagaccaccactgaagttgtttagg

SEQ ID NO: 1795 - DNA, 25 bp, Artificial Sequence
  probe
gataaacttcttcagatactttttt

SEQ ID NO: 1796 - DNA, 25 bp, Artificial Sequence
  probe
accatggacaagtatattctgctgc

SEQ ID NO: 1797 - DNA, 25 bp, Artificial Sequence
  probe
tggacaagtatattctgctgccaca

SEQ ID NO: 1798 - DNA, 25 bp, Artificial Sequence
  probe
gccacaaagactgtaaagtgcttca

SEQ ID NO: 1799 - DNA, 25 bp, Artificial Sequence
  probe
agtgcttcatttcaacagctgaggc

SEQ ID NO: 1800 - DNA, 25 bp, Artificial Sequence
  probe
tcatttcaacagctgaggcaagcca

SEQ ID NO: 1801 - DNA, 25 bp, Artificial Sequence
  probe
gaggcaagccaagtgatcattaata

SEQ ID NO: 1802 - DNA, 25 bp, Artificial Sequence
  probe
taaagcttttcttggttccttcagt

SEQ ID NO: 1803 - DNA, 25 bp, Artificial Sequence
  probe
tccttcagtggtgttggtagtaaaa

SEQ ID NO: 1804 - DNA, 25 bp, Artificial Sequence
  probe
gtggtcaaccacagagtcttcaaga

SEQ ID NO: 1805 - DNA, 25 bp, Artificial Sequence
  probe
gaaagtagttcttgttggtgccttc

SEQ ID NO: 1806 - DNA, 25 bp, Artificial Sequence
  probe
gttcttgttggtgccttcatttaaa

SEQ ID NO: 1807 - DNA, 25 bp, Artificial Sequence
  probe
accactctgggcacaagcagggcac

SEQ ID NO: 1808 - DNA, 25 bp, Artificial Sequence
  probe
cccttaagccaacaaccacagtgcc

SEQ ID NO: 1809 - DNA, 25 bp, Artificial Sequence
  probe
ccaggcccgcactgggggcaattga

SEQ ID NO: 1810 - DNA, 25 bp, Artificial Sequence
  probe
tccgagacccaggagacaaacagcc

SEQ ID NO: 1811 - DNA, 25 bp, Artificial Sequence
  probe
ggggaaacttgggaatcattctggc

SEQ ID NO: 1812 - DNA, 25 bp, Artificial Sequence
  probe
attctggcttaaacaacacctcctc

SEQ ID NO: 1813 - DNA, 25 bp, Artificial Sequence
  probe
ggctcactgcaggcatgctgaacaa

SEQ ID NO: 1814 - DNA, 25 bp, Artificial Sequence
  probe
ggcatgctgaacaaggggcctccaa

SEQ ID NO: 1815 - DNA, 25 bp, Artificial Sequence
  probe
gagagggtggcatcaggagctgctc

SEQ ID NO: 1816 - DNA, 25 bp, Artificial Sequence
  probe
gcatgggcgatgtcactcatgccct

SEQ ID NO: 1817 - DNA, 25 bp, Artificial Sequence
  probe
tccctccttcatgatttccattaaa

SEQ ID NO: 1818 - DNA, 25 bp, Artificial Sequence
  probe
caccgggcacagaaagacttccttt

SEQ ID NO: 1819 - DNA, 25 bp, Artificial Sequence
  probe
ccaggtcagcactgtgtggcacgtg

SEQ ID NO: 1820 - DNA, 25 bp, Artificial Sequence
  probe
ccccaggcagctgctacctggatgc

SEQ ID NO: 1821 - DNA, 25 bp, Artificial Sequence
  probe
tgctacctggatgcagggctgcggc

SEQ ID NO: 1822 - DNA, 25 bp, Artificial Sequence
  probe
ggtgcagggcctggtgagcacagtc

SEQ ID NO: 1823 - DNA, 25 bp, Artificial Sequence
  probe
tggtgagcacagtcagcgtcactca

SEQ ID NO: 1824 - DNA, 25 bp, Artificial Sequence
  probe
ccacctgctttatgcccagatggac

SEQ ID NO: 1825 - DNA, 25 bp, Artificial Sequence
  probe
gaaggtggccgtggggacattacag

SEQ ID NO: 1826 - DNA, 25 bp, Artificial Sequence
  probe
gatgctaggtgtctgggatcggggt

SEQ ID NO: 1827 - DNA, 25 bp, Artificial Sequence
  probe
gtggggacaggtagaccaggtgctc

SEQ ID NO: 1828 - DNA, 25 bp, Artificial Sequence
  probe
gcccaggcacaacttcagcagggga

SEQ ID NO: 1829 - DNA, 25 bp, Artificial Sequence
  probe
aatagacttgtgtcttcaccttgct

SEQ ID NO: 1830 - DNA, 25 bp, Artificial Sequence
  probe
gtcttcaccttgctgcattgtgacc

SEQ ID NO: 1831 - DNA, 25 bp, Artificial Sequence
  probe
gtgaccagcacctacggctggacag

SEQ ID NO: 1832 - DNA, 25 bp, Artificial Sequence
  probe
gagcggatcatgaaagcccaggcac

SEQ ID NO: 1833 - DNA, 25 bp, Artificial Sequence
  probe
aaaagcacctggagatcaaccctga

SEQ ID NO: 1834 - DNA, 25 bp, Artificial Sequence
  probe
tggtggtgctgctgtttgaaaccgc

SEQ ID NO: 1835 - DNA, 25 bp, Artificial Sequence
  probe
caaccgcatctatcgcatgatcaag

SEQ ID NO: 1836 - DNA, 25 bp, Artificial Sequence
  probe
gcagaggaacccaatgctgcagttc

SEQ ID NO: 1837 - DNA, 25 bp, Artificial Sequence
  probe
tcccccctctcgagggcgatgagga

SEQ ID NO: 1838 - DNA, 25 bp, Artificial Sequence
  probe
gggcgatgaggatgcgtctcgcatg

SEQ ID NO: 1839 - DNA, 25 bp, Artificial Sequence
  probe
aacttgtgcccttgtatagtgtccc

SEQ ID NO: 1840 - DNA, 25 bp, Artificial Sequence
  probe
aatagacttgtgtcttcaccttgct

SEQ ID NO: 1841 - DNA, 25 bp, Artificial Sequence
  probe
gtcttcaccttgctgcattgtgacc

SEQ ID NO: 1842 - DNA, 25 bp, Artificial Sequence
  probe
gtgaccagcacctacggctggacag

SEQ ID NO: 1843 - DNA, 25 bp, Artificial Sequence
  probe
gagcggatcatgaaagcccaggcac

SEQ ID NO: 1844 - DNA, 25 bp, Artificial Sequence
  probe
aaaagcacctggagatcaaccctga

SEQ ID NO: 1845 - DNA, 25 bp, Artificial Sequence
  probe
tggtggtgctgctgtttgaaaccgc

SEQ ID NO: 1846 - DNA, 25 bp, Artificial Sequence
  probe
caaccgcatctatcgcatgatcaag

SEQ ID NO: 1847 - DNA, 25 bp, Artificial Sequence
  probe
gcagaggaacccaatgctgcagttc

SEQ ID NO: 1848 - DNA, 25 bp, Artificial Sequence
  probe
tcccccctctcgagggcgatgagga

SEQ ID NO: 1849 - DNA, 25 bp, Artificial Sequence
  probe
gggcgatgaggatgcgtctcgcatg

SEQ ID NO: 1850 - DNA, 25 bp, Artificial Sequence
  probe
aacttgtgcccttgtatagtgtccc

SEQ ID NO: 1851 - DNA, 25 bp, Artificial Sequence
  probe
catacctcccagtctggagatgaga

SEQ ID NO: 1852 - DNA, 25 bp, Artificial Sequence
  probe
atctctgtcagagtatgtttctcgc

SEQ ID NO: 1853 - DNA, 25 bp, Artificial Sequence
  probe
atgtttctcgcatgaaggagacaca

SEQ ID NO: 1854 - DNA, 25 bp, Artificial Sequence
  probe
ggagacacagaagtccatctattac

SEQ ID NO: 1855 - DNA, 25 bp, Artificial Sequence
  probe
gaagtccatctattacatcactggt

SEQ ID NO: 1856 - DNA, 25 bp, Artificial Sequence
  probe
ccatctattacatcactggtgagag

SEQ ID NO: 1857 - DNA, 25 bp, Artificial Sequence
  probe
ggtgagagcaaagagcaggtggcca

SEQ ID NO: 1858 - DNA, 25 bp, Artificial Sequence
  probe
aagagcaggtggccaactcagcttt

SEQ ID NO: 1859 - DNA, 25 bp, Artificial Sequence
  probe
ccctgctggtgtctagtgttttttt

SEQ ID NO: 1860 - DNA, 25 bp, Artificial Sequence
  probe
aatctcaagcttggaatccacgaag

SEQ ID NO: 1861 - DNA, 25 bp, Artificial Sequence
  probe
ggaatccacgaagactccactaacc

SEQ ID NO: 1862 - DNA, 25 bp, Artificial Sequence
  probe
gggacttaacatttcacgttgtatc

SEQ ID NO: 1863 - DNA, 25 bp, Artificial Sequence
  probe
acgttgtatcttacttgcagtgaat

SEQ ID NO: 1864 - DNA, 25 bp, Artificial Sequence
  probe
tgcaagggttacttttctctgggga

SEQ ID NO: 1865 - DNA, 25 bp, Artificial Sequence
  probe
ccatgccgcatggtttggttaatga

SEQ ID NO: 1866 - DNA, 25 bp, Artificial Sequence
  probe
gcttccacatgcctggcctaaaatg

SEQ ID NO: 1867 - DNA, 25 bp, Artificial Sequence
  probe
atacaggtcttatatccccatatgg

SEQ ID NO: 1868 - DNA, 25 bp, Artificial Sequence
  probe
tggaatttatccatcaaccacataa

SEQ ID NO: 1869 - DNA, 25 bp, Artificial Sequence
  probe
tcaaagtttccacattagcactccc

SEQ ID NO: 1870 - DNA, 25 bp, Artificial Sequence
  probe
taaggacgctgggagcctgtcagtt

SEQ ID NO: 1871 - DNA, 25 bp, Artificial Sequence
  probe
gtttatgatctgacctaggtccccc

SEQ ID NO: 1872 - DNA, 25 bp, Artificial Sequence
  probe
tatgggcgggacgtgtgtgtcatta

SEQ ID NO: 1873 - DNA, 25 bp, Artificial Sequence
  probe
gtaccccgagctgcggtgtttgaag

SEQ ID NO: 1874 - DNA, 25 bp, Artificial Sequence
  probe
ctccagccgggaggtgccggtgggg

SEQ ID NO: 1875 - DNA, 25 bp, Artificial Sequence
  probe
tcccgttcttcgtcaacgtaacaca

SEQ ID NO: 1876 - DNA, 25 bp, Artificial Sequence
  probe
tggtacttatcagtgccaagcgtcc

SEQ ID NO: 1877 - DNA, 25 bp, Artificial Sequence
  probe
agcgtccagctcacgaggcaaatac

SEQ ID NO: 1878 - DNA, 25 bp, Artificial Sequence
  probe
gggcgtggtgactatcgtactggcc

SEQ ID NO: 1879 - DNA, 25 bp, Artificial Sequence
  probe
aatgtacgtcttcagggagcaccaa

SEQ ID NO: 1880 - DNA, 25 bp, Artificial Sequence
  probe
accaacggagcggcagttaccatgt

SEQ ID NO: 1881 - DNA, 25 bp, Artificial Sequence
  probe
tagggaggagagcacctatctgccc

SEQ ID NO: 1882 - DNA, 25 bp, Artificial Sequence
  probe
tcacgtctatgcagccgacagaagc

SEQ ID NO: 1883 - DNA, 25 bp, Artificial Sequence
  probe
attccgcaccaataaagccttcaaa

SEQ ID NO: 1884 - DNA, 25 bp, Artificial Sequence
  probe
cagtcactctaaatggacaccacat

SEQ ID NO: 1885 - DNA, 25 bp, Artificial Sequence
  probe
tggacaccacatgaacctctgttta

SEQ ID NO: 1886 - DNA, 25 bp, Artificial Sequence
  probe
acctctgtttagaatacctacgtat

SEQ ID NO: 1887 - DNA, 25 bp, Artificial Sequence
  probe
gtatgcattggtttgcttgtttctt

SEQ ID NO: 1888 - DNA, 25 bp, Artificial Sequence
  probe
ttgcttgtttcttgacagtacattt

SEQ ID NO: 1889 - DNA, 25 bp, Artificial Sequence
  probe
ttagatctggccttttcttaacaaa

SEQ ID NO: 1890 - DNA, 25 bp, Artificial Sequence
  probe
gatgcaggtggatgtccctaggtct

SEQ ID NO: 1891 - DNA, 25 bp, Artificial Sequence
  probe
caaagaactttttccaagtgcttgt

SEQ ID NO: 1892 - DNA, 25 bp, Artificial Sequence
  probe
gagtggactgtatcatttgctattc

SEQ ID NO: 1893 - DNA, 25 bp, Artificial Sequence
  probe
gcacaaaatgacactcttctaaaac

SEQ ID NO: 1894 - DNA, 25 bp, Artificial Sequence
  probe
tgggcacaagagaattttcctggga

SEQ ID NO: 1895 - DNA, 25 bp, Artificial Sequence
  probe
atcccaaagcaccaattactgccct

SEQ ID NO: 1896 - DNA, 25 bp, Artificial Sequence
  probe
cctctgcctcagcagtaccagtata

SEQ ID NO: 1897 - DNA, 25 bp, Artificial Sequence
  probe
gactggaggcaactcagcctgagtt

SEQ ID NO: 1898 - DNA, 25 bp, Artificial Sequence
  probe
gagcttgagcttgggcttaggcttg

SEQ ID NO: 1899 - DNA, 25 bp, Artificial Sequence
  probe
taggcttgggctcagcttttgaccc

SEQ ID NO: 1900 - DNA, 25 bp, Artificial Sequence
  probe
atcttcagacactcactattttcat

SEQ ID NO: 1901 - DNA, 25 bp, Artificial Sequence
  probe
tccccacaaccaaagacaactcatg

SEQ ID NO: 1902 - DNA, 25 bp, Artificial Sequence
  probe
tcctttggcccttgtgtaacattgc

SEQ ID NO: 1903 - DNA, 25 bp, Artificial Sequence
  probe
ggctttgcaaaatgtacccaggtca

SEQ ID NO: 1904 - DNA, 25 bp, Artificial Sequence
  probe
tttagcaatgatatccctgtctggg

SEQ ID NO: 1905 - DNA, 25 bp, Artificial Sequence
  probe
cctgtctgggtcactttttaagctt

SEQ ID NO: 1906 - DNA, 25 bp, Artificial Sequence
  probe
agagacatgtaccttgaccatcgtc

SEQ ID NO: 1907 - DNA, 25 bp, Artificial Sequence
  probe
cttcctctcaagctagcccagaggg

SEQ ID NO: 1908 - DNA, 25 bp, Artificial Sequence
  probe
taatggtcacgaggtccagacccac

SEQ ID NO: 1909 - DNA, 25 bp, Artificial Sequence
  probe
cccaaagctcagacttgccaggctc

SEQ ID NO: 1910 - DNA, 25 bp, Artificial Sequence
  probe
gtccttcctttaggtctggttgttg

SEQ ID NO: 1911 - DNA, 25 bp, Artificial Sequence
  probe
ccatctgcttggttggctggcagct

SEQ ID NO: 1912 - DNA, 25 bp, Artificial Sequence
  probe
ggagaagacccacgtgctaggggat

SEQ ID NO: 1913 - DNA, 25 bp, Artificial Sequence
  probe
gctaggggatgaggggcttcctggg

SEQ ID NO: 1914 - DNA, 25 bp, Artificial Sequence
  probe
accccatttgtggtcacagccatga

SEQ ID NO: 1915 - DNA, 25 bp, Artificial Sequence
  probe
tcaccgggatgaacctatccttcca

SEQ ID NO: 1916 - DNA, 25 bp, Artificial Sequence
  probe
ggcatcttctggcttgactggatgg

SEQ ID NO: 1917 - DNA, 25 bp, Artificial Sequence
  probe
ctccgtctcctagtgataatgctcc

SEQ ID NO: 1918 - DNA, 25 bp, Artificial Sequence
  probe
taatgctccaagtctatgaactgtt

SEQ ID NO: 1919 - DNA, 25 bp, Artificial Sequence
  probe
gggaactttctatgcaatgttcagg

SEQ ID NO: 1920 - DNA, 25 bp, Artificial Sequence
  probe
ggataaatcgatactgctggccaat

SEQ ID NO: 1921 - DNA, 25 bp, Artificial Sequence
  probe
cgatactgctggccaatcagtgtca

SEQ ID NO: 1922 - DNA, 25 bp, Artificial Sequence
  probe
tctcctgggtaaattttgatgtcgc

SEQ ID NO: 1923 - DNA, 25 bp, Artificial Sequence
  probe
ttcttcatctgaaccaacatgctac

SEQ ID NO: 1924 - DNA, 25 bp, Artificial Sequence
  probe
tgaccacagacatgttattcttctg

SEQ ID NO: 1925 - DNA, 25 bp, Artificial Sequence
  probe
gaaagagccacattttggttttatt

SEQ ID NO: 1926 - DNA, 25 bp, Artificial Sequence
  probe
tgaaatcttttatatctgttgccta

SEQ ID NO: 1927 - DNA, 25 bp, Artificial Sequence
  probe
atctgttgcctagttttgtacatgg

SEQ ID NO: 1928 - DNA, 25 bp, Artificial Sequence
  probe
gaaatatttctagcagtgtcagtga

SEQ ID NO: 1929 - DNA, 25 bp, Artificial Sequence
  probe
gtaacatactgttcttgtagttttt

SEQ ID NO: 1930 - DNA, 25 bp, Artificial Sequence
  probe
caggttaattacccaaagcctcatc

SEQ ID NO: 1931 - DNA, 25 bp, Artificial Sequence
  probe
gccatgctgagcaattgttctctgt

SEQ ID NO: 1932 - DNA, 25 bp, Artificial Sequence
  probe
tgttctctgtacatggtaaccaaaa

SEQ ID NO: 1933 - DNA, 25 bp, Artificial Sequence
  probe
gccaggcatgatggttgcccaagac

SEQ ID NO: 1934 - DNA, 25 bp, Artificial Sequence
  probe
atggttgcccaagacagttaaatta

SEQ ID NO: 1935 - DNA, 25 bp, Artificial Sequence
  probe
aattctgtattttattagggctctg

SEQ ID NO: 1936 - DNA, 25 bp, Artificial Sequence
  probe
ttagggctctgttatgtccttcatc

SEQ ID NO: 1937 - DNA, 25 bp, Artificial Sequence
  probe
ctctgttatgtccttcatctgaaat

SEQ ID NO: 1938 - DNA, 25 bp, Artificial Sequence
  probe
ggtgtatgcttggtactggagattc

SEQ ID NO: 1939 - DNA, 25 bp, Artificial Sequence
  Probe
atttttttatacctacatagcacat

SEQ ID NO: 1940 - DNA, 25 bp, Artificial Sequence
  Probe
tgaagtatctactattctggaatat

SEQ ID NO: 1941 - DNA, 25 bp, Artificial Sequence
  Probe
ggtgccttgattcagttgcgtgact

SEQ ID NO: 1942 - DNA, 25 bp, Artificial Sequence
  Probe
gcgtgacttagaacattcatcctat

SEQ ID NO: 1943 - DNA, 25 bp, Artificial Sequence
  Probe
tgtttttggttgcagtctggcggct

SEQ ID NO: 1944 - DNA, 25 bp, Artificial Sequence
  Probe
gcaggcatagcgtcggttttgttcc

SEQ ID NO: 1945 - DNA, 25 bp, Artificial Sequence
  Probe
cagatatggttcagctgctacaatt

SEQ ID NO: 1946 - DNA, 25 bp, Artificial Sequence
  Probe
acagtcaagacctgccattcgtttt

SEQ ID NO: 1947 - DNA, 25 bp, Artificial Sequence
  Probe
cattcgttttctcttgcaggttgga

SEQ ID NO: 1948 - DNA, 25 bp, Artificial Sequence
  Probe
ttgcactttgaatcatgtgggtcat

SEQ ID NO: 1949 - DNA, 25 bp, Artificial Sequence
  Probe
atgtgggtcatttggggaccttgtt

SEQ ID NO: 1950 - DNA, 25 bp, Artificial Sequence
  Probe
ggaaaggcaatcgagagttggttag

SEQ ID NO: 1951 - DNA, 25 bp, Artificial Sequence
  Probe
gatcaattcactcattttgtggtaa

SEQ ID NO: 1952 - DNA, 25 bp, Artificial Sequence
  Probe
agggaagccagttatatttattatt

SEQ ID NO: 1953 - DNA, 25 bp, Artificial Sequence
  Probe
gttctgtgtagacggattctgtaga

SEQ ID NO: 1954 - DNA, 25 bp, Artificial Sequence
  Probe
ggatgtggcttttagagaagtccag

SEQ ID NO: 1955 - DNA, 25 bp, Artificial Sequence
  Probe
gaagcaagaactagctgcagggaaa

SEQ ID NO: 1956 - DNA, 25 bp, Artificial Sequence
  Probe
gcagggaaagttccttctgtcggtt

SEQ ID NO: 1957 - DNA, 25 bp, Artificial Sequence
  Probe
tttagacacagatctctctgcccaa

SEQ ID NO: 1958 - DNA, 25 bp, Artificial Sequence
  Probe
cagatctctctgcccaaattaaaaa

SEQ ID NO: 1959 - DNA, 25 bp, Artificial Sequence
  Probe
gacacaattacttgctaggtactgg

SEQ ID NO: 1960 - DNA, 25 bp, Artificial Sequence
  Probe
ggtactgggttcctgattgtcttta

SEQ ID NO: 1961 - DNA, 25 bp, Artificial Sequence
  Probe
gaggaggagctgcccaagagggtcc

SEQ ID NO: 1962 - DNA, 25 bp, Artificial Sequence
  Probe
tgccacggaggactccgggcggagc

SEQ ID NO: 1963 - DNA, 25 bp, Artificial Sequence
  Probe
accccactcaactactcagaatttt

SEQ ID NO: 1964 - DNA, 25 bp, Artificial Sequence
  Probe
taaaccatgtaagctctcttcttct

SEQ ID NO: 1965 - DNA, 25 bp, Artificial Sequence
  Probe
gctctcttcttctcgaaaaggtgct

SEQ ID NO: 1966 - DNA, 25 bp, Artificial Sequence
  Probe
aaaaggtgctactgcaatgccctac

SEQ ID NO: 1967 - DNA, 25 bp, Artificial Sequence
  Probe
tactgcaatgccctactgagcaacc

SEQ ID NO: 1968 - DNA, 25 bp, Artificial Sequence
  Probe
gccctactgagcaacctttgagatt

SEQ ID NO: 1969 - DNA, 25 bp, Artificial Sequence
  Probe
ctttgagattgtcacttctgtacat

SEQ ID NO: 1970 - DNA, 25 bp, Artificial Sequence
  Probe
tgtcacttctgtacataaaccacct

SEQ ID NO: 1971 - DNA, 25 bp, Artificial Sequence
  Probe
aaaccacctttgtgaggctctttct

SEQ ID NO: 1972 - DNA, 25 bp, Artificial Sequence
  Probe
taaaagagtgtcctaacagtccccg

SEQ ID NO: 1973 - DNA, 25 bp, Artificial Sequence
  Probe
tcctaacagtccccgggctagagag

SEQ ID NO: 1974 - DNA, 25 bp, Artificial Sequence
  Probe
aacagtccccgggctagagaggact

SEQ ID NO: 1975 - DNA, 25 bp, Artificial Sequence
  Probe
tccccgggctagagaggactaagga

SEQ ID NO: 1976 - DNA, 25 bp, Artificial Sequence
  Probe
gagagtgttacgcaggagcaagcct

SEQ ID NO: 1977 - DNA, 25 bp, Artificial Sequence
  Probe
gtgttacgcaggagcaagcctttca

SEQ ID NO: 1978 - DNA, 25 bp, Artificial Sequence
  Probe
aaaacgtggaggtgtccctctgcac

SEQ ID NO: 1979 - DNA, 25 bp, Artificial Sequence
  Probe
cgtggcgctgacactgtattcttat

SEQ ID NO: 1980 - DNA, 25 bp, Artificial Sequence
  Probe
ggcgctgacactgtattcttatgtt

SEQ ID NO: 1981 - DNA, 25 bp, Artificial Sequence
  Probe
cactgtattcttatgttgtttgaaa

SEQ ID NO: 1982 - DNA, 25 bp, Artificial Sequence
  Probe
tgtaaagaagcgggcgggtgcccct

SEQ ID NO: 1983 - DNA, 25 bp, Artificial Sequence
  Probe
cagaagggcaggccggagctgcaca

SEQ ID NO: 1984 - DNA, 25 bp, Artificial Sequence
  Probe
tctctgtgtcttactctgtgcaaag

SEQ ID NO: 1985 - DNA, 25 bp, Artificial Sequence
  Probe
gtgtcttactctgtgcaaagacgcg

SEQ ID NO: 1986 - DNA, 25 bp, Artificial Sequence
  Probe
cttactctgtgcaaagacgcggcaa

SEQ ID NO: 1987 - DNA, 25 bp, Artificial Sequence
  Probe
gcaaagacgcggcaaaacccagtgc

SEQ ID NO: 1988 - DNA, 25 bp, Artificial Sequence
  Probe
caaagacgcggcaaaacccagtgcc

SEQ ID NO: 1989 - DNA, 25 bp, Artificial Sequence
  Probe
cccacccgagatgaaggatacgctg

SEQ ID NO: 1990 - DNA, 25 bp, Artificial Sequence
  Probe
ggatacgctgtattttttgcctaat

SEQ ID NO: 1991 - DNA, 25 bp, Artificial Sequence
  Probe
acgctgtattttttgcctaatgtcc

SEQ ID NO: 1992 - DNA, 25 bp, Artificial Sequence
  Probe
gtccctgcctctaggttcataatga

SEQ ID NO: 1993 - DNA, 25 bp, Artificial Sequence
  Probe
tccctgcctctaggttcataatgaa

SEQ ID NO: 1994 - DNA, 25 bp, Artificial Sequence
  Probe
ccaggcccttctggttggtagtgag

SEQ ID NO: 1995 - DNA, 25 bp, Artificial Sequence
  Probe
gcccttctggttggtagtgagtgtg

SEQ ID NO: 1996 - DNA, 25 bp, Artificial Sequence
  Probe
tagtgagtgtggacagcttcccagc

SEQ ID NO: 1997 - DNA, 25 bp, Artificial Sequence
  Probe
cagctcttcgggtacaaccctgagc

SEQ ID NO: 1998 - DNA, 25 bp, Artificial Sequence
  Probe
ggtacaaccctgagcaggtcggggg

SEQ ID NO: 1999 - DNA, 25 bp, Artificial Sequence
  Probe
ctgagcaggtcgggggacacagggc

SEQ ID NO: 2000 - DNA, 25 bp, Artificial Sequence
  Probe
cctgcttccgggcagggacgaggcc

SEQ ID NO: 2001 - DNA, 25 bp, Artificial Sequence
  Probe
ctgctgtcacctgaggggaatctgc

SEQ ID NO: 2002 - DNA, 25 bp, Artificial Sequence
  Probe
ggaatctgcttcttaggagtgggtt

SEQ ID NO: 2003 - DNA, 25 bp, Artificial Sequence
  Probe
ggagtgggttgagctgatagagaaa

SEQ ID NO: 2004 - DNA, 25 bp, Artificial Sequence
  Probe
gagaaaaaacggccttcagcccagg

SEQ ID NO: 2005 - DNA, 25 bp, Artificial Sequence
  Probe
tggacttcagttctgctagcatgta

SEQ ID NO: 2006 - DNA, 25 bp, Artificial Sequence
  Probe
gctagcatgtaaagagtggtggact

SEQ ID NO: 2007 - DNA, 25 bp, Artificial Sequence
  Probe
gtatcattacaagtcacctggaaca

SEQ ID NO: 2008 - DNA, 25 bp, Artificial Sequence
  Probe
gaacaggttctttgggcaacagaca

SEQ ID NO: 2009 - DNA, 25 bp, Artificial Sequence
  Probe
ctgtcccgtgagtgtgtctgagtac

SEQ ID NO: 2010 - DNA, 25 bp, Artificial Sequence
  Probe
gtgtgtctgagtaccattcactgga

SEQ ID NO: 2011 - DNA, 25 bp, Artificial Sequence
  Probe
ttcactggagttgctgcttaggtct

SEQ ID NO: 2012 - DNA, 25 bp, Artificial Sequence
  Probe
tgtgactcttaacaattgctgtctg

SEQ ID NO: 2013 - DNA, 25 bp, Artificial Sequence
  Probe
gcacattgtgttcataatgtactcc

SEQ ID NO: 2014 - DNA, 25 bp, Artificial Sequence
  Probe
taatgtactccacaatggccagtcc

SEQ ID NO: 2015 - DNA, 25 bp, Artificial Sequence
  Probe
gccagtccaattgctatctattttt

SEQ ID NO: 2016 - DNA, 25 bp, Artificial Sequence
  Probe
tgttctctgttggagctgtaagcag

SEQ ID NO: 2017 - DNA, 25 bp, Artificial Sequence
  Probe
ggaaggagagatccattgagtccag

SEQ ID NO: 2018 - DNA, 25 bp, Artificial Sequence
  Probe
gagtccagaagccagatcagcaaat

SEQ ID NO: 2019 - DNA, 25 bp, Artificial Sequence
  Probe
gaccagaaagatctccatcggttgc

SEQ ID NO: 2020 - DNA, 25 bp, Artificial Sequence
  Probe
catcggttgcccaaggctgtaagta

SEQ ID NO: 2021 - DNA, 25 bp, Artificial Sequence
  Probe
gtagtgatggttttagcgatgaata

SEQ ID NO: 2022 - DNA, 25 bp, Artificial Sequence
  Probe
attggctatgaagtactgtggcaga

SEQ ID NO: 2023 - DNA, 25 bp, Artificial Sequence
  Probe
gagaagccatttttagctcagagca

SEQ ID NO: 2024 - DNA, 25 bp, Artificial Sequence
  Probe
gaacttttggcagattttgttggca

SEQ ID NO: 2025 - DNA, 25 bp, Artificial Sequence
  Probe
ttattacactcattggtttttattg

SEQ ID NO: 2026 - DNA, 25 bp, Artificial Sequence
  Probe
tttctactatggttcctttagcaga

SEQ ID NO: 2027 - DNA, 25 bp, Artificial Sequence
  Probe
gagcagcgtggagagctggccatta

SEQ ID NO: 2028 - DNA, 25 bp, Artificial Sequence
  Probe
aggatgccaacgccaagttgtccga

SEQ ID NO: 2029 - DNA, 25 bp, Artificial Sequence
  Probe
gggccaagcaggacatggcgcggca

SEQ ID NO: 2030 - DNA, 25 bp, Artificial Sequence
  Probe
cggcagctgcgtgagtaccaggagc

SEQ ID NO: 2031 - DNA, 25 bp, Artificial Sequence
  Probe
tcgccacctacaggaagctgctgga

SEQ ID NO: 2032 - DNA, 25 bp, Artificial Sequence
  Probe
gcggctatgcaggtggtctgagctc

SEQ ID NO: 2033 - DNA, 25 bp, Artificial Sequence
  Probe
tcctccagggccgtggttgtgaaga

SEQ ID NO: 2034 - DNA, 25 bp, Artificial Sequence
  Probe
tgggaagctggtgtctgagtcctct

SEQ ID NO: 2035 - DNA, 25 bp, Artificial Sequence
  Probe
gcccaagtgaacagctgcggcagcc

SEQ ID NO: 2036 - DNA, 25 bp, Artificial Sequence
  Probe
tgaaccggaacatcagccggctcca

SEQ ID NO: 2037 - DNA, 25 bp, Artificial Sequence
  Probe
gccggctccaggctgagattgaggg

SEQ ID NO: 2038 - DNA, 25 bp, Artificial Sequence
  Probe
attttctccatggcctgaattaaga

SEQ ID NO: 2039 - DNA, 25 bp, Artificial Sequence
  Probe
aagaccattagaaagcaccaggccg

SEQ ID NO: 2040 - DNA, 25 bp, Artificial Sequence
  Probe
ctgactgttcttgtggatcttgtgt

SEQ ID NO: 2041 - DNA, 25 bp, Artificial Sequence
  Probe
tgtggatcttgtgtccagggacatg

SEQ ID NO: 2042 - DNA, 25 bp, Artificial Sequence
  Probe
acatggggtgacatgcctcgtatgt

SEQ ID NO: 2043 - DNA, 25 bp, Artificial Sequence
  Probe
gtgacatgcctcgtatgtgttagag

SEQ ID NO: 2044 - DNA, 25 bp, Artificial Sequence
  Probe
gtggaatggatgtgtttggcgctgc

SEQ ID NO: 2045 - DNA, 25 bp, Artificial Sequence
  Probe
ttggcgctgcatgggatctggtgcc

SEQ ID NO: 2046 - DNA, 25 bp, Artificial Sequence
  Probe
tgccctagattggttcaaggaggtc

SEQ ID NO: 2047 - DNA, 25 bp, Artificial Sequence
  Probe
ggttcaaggaggtcatccaactgac

SEQ ID NO: 2048 - DNA, 25 bp, Artificial Sequence
  Probe
gaggtcatccaactgactttatcaa

SEQ ID NO: 2049 - DNA, 25 bp, Artificial Sequence
  Probe
gtagaattcttcctgtacgattggg

SEQ ID NO: 2050 - DNA, 25 bp, Artificial Sequence
  Probe
ttcactaaccttccctaggcattga

SEQ ID NO: 2051 - DNA, 25 bp, Artificial Sequence
  Probe
aacttcccccaaatctgatggacct

SEQ ID NO: 2052 - DNA, 25 bp, Artificial Sequence
  Probe
ggacctagaagtctgcttttgtacc

SEQ ID NO: 2053 - DNA, 25 bp, Artificial Sequence
  Probe
tctgttccctctcttttgaaaatgt

SEQ ID NO: 2054 - DNA, 25 bp, Artificial Sequence
  Probe
gggttacttgattagctgtgtttgg

SEQ ID NO: 2055 - DNA, 25 bp, Artificial Sequence
  Probe
tggaactgctaccgatacatcaatg

SEQ ID NO: 2056 - DNA, 25 bp, Artificial Sequence
  Probe
actcctctgatgtcctggtttatgt

SEQ ID NO: 2057 - DNA, 25 bp, Artificial Sequence
  Probe
gcaatgacactacggtgctgctacc

SEQ ID NO: 2058 - DNA, 25 bp, Artificial Sequence
  Probe
tgccactgtgaatggtgctgccaag

SEQ ID NO: 2059 - DNA, 25 bp, Artificial Sequence
  Probe
gtctgcctaagccttcaagtgggcg

SEQ ID NO: 2060 - DNA, 25 bp, Artificial Sequence
  Probe
atatttgatatacttctgcctaaca

SEQ ID NO: 2061 - DNA, 25 bp, Artificial Sequence
  Probe
tatacttctgcctaacaacatggaa

SEQ ID NO: 2062 - DNA, 25 bp, Artificial Sequence
  Probe
catcctactgctttgaacttccaag

SEQ ID NO: 2063 - DNA, 25 bp, Artificial Sequence
  Probe
gaacttccaagtatgtctagtcacc

SEQ ID NO: 2064 - DNA, 25 bp, Artificial Sequence
  Probe
ccaagtatgtctagtcaccttttaa

SEQ ID NO: 2065 - DNA, 25 bp, Artificial Sequence
  Probe
gaaaaatgaggattgccttccttgt

SEQ ID NO: 2066 - DNA, 25 bp, Artificial Sequence
  Probe
tccttgtatgcgctttttaccttga

SEQ ID NO: 2067 - DNA, 25 bp, Artificial Sequence
  Probe
tttttaccttgactacctgaattgc

SEQ ID NO: 2068 - DNA, 25 bp, Artificial Sequence
  Probe
gactacctgaattgcaagggatttt

SEQ ID NO: 2069 - DNA, 25 bp, Artificial Sequence
  Probe
gttacaaagtcagcaactctcctgt

SEQ ID NO: 2070 - DNA, 25 bp, Artificial Sequence
  Probe
actctcctgttggttcattattgaa

SEQ ID NO: 2071 - DNA, 25 bp, Artificial Sequence
  Probe
agcttgtctggtaagtggcttctct

SEQ ID NO: 2072 - DNA, 25 bp, Artificial Sequence
  Probe
tgtaacacatagtggcttctccgcc

SEQ ID NO: 2073 - DNA, 25 bp, Artificial Sequence
  Probe
cttctccgcccttgtaaggtgttca

SEQ ID NO: 2074 - DNA, 25 bp, Artificial Sequence
  Probe
caaaccccactctgttggtagcaat

SEQ ID NO: 2075 - DNA, 25 bp, Artificial Sequence
  Probe
gtagcaattggcagccctatttcag

SEQ ID NO: 2076 - DNA, 25 bp, Artificial Sequence
  Probe
aaaccttaacagatgcgttcagcag

SEQ ID NO: 2077 - DNA, 25 bp, Artificial Sequence
  Probe
cgttcagcagactggtttgcagtga

SEQ ID NO: 2078 - DNA, 25 bp, Artificial Sequence
  Probe
agcccagcacttgaattgttattac

SEQ ID NO: 2079 - DNA, 25 bp, Artificial Sequence
  Probe
tgagcattgatgtacccatttttta

SEQ ID NO: 2080 - DNA, 25 bp, Artificial Sequence
  Probe
actgtcatcctaacgtttgtcattc

SEQ ID NO: 2081 - DNA, 25 bp, Artificial Sequence
  Probe
aacgtttgtcattccagtttgagtt

SEQ ID NO: 2082 - DNA, 25 bp, Artificial Sequence
  Probe
gctccttcagcaagcaggctagtca

SEQ ID NO: 2083 - DNA, 25 bp, Artificial Sequence
  Probe
tggggcttcaagggcaatacccccg

SEQ ID NO: 2084 - DNA, 25 bp, Artificial Sequence
  Probe
gcaatacccccgtgcttagggtttg

SEQ ID NO: 2085 - DNA, 25 bp, Artificial Sequence
  Probe
ggttcctggcaaaaatgtacctcca

SEQ ID NO: 2086 - DNA, 25 bp, Artificial Sequence
  Probe
tccaggggcctccaagcataggatt

SEQ ID NO: 2087 - DNA, 25 bp, Artificial Sequence
  Probe
gaagacaggaacggcacaggcgtcc

SEQ ID NO: 2088 - DNA, 25 bp, Artificial Sequence
  Probe
gaaagcagctgcactcagacaatgc

SEQ ID NO: 2089 - DNA, 25 bp, Artificial Sequence
  Probe
aatgccttctccattacttgaagct

SEQ ID NO: 2090 - DNA, 25 bp, Artificial Sequence
  Probe
cttgaagcttctttctgttcagcca

SEQ ID NO: 2091 - DNA, 25 bp, Artificial Sequence
  Probe
acctttgtgcagggacagttggctt

SEQ ID NO: 2092 - DNA, 25 bp, Artificial Sequence
  Probe
ggcttccagaggtttcagctttcag

SEQ ID NO: 2093 - DNA, 25 bp, Artificial Sequence
  Probe
gattacgggcaagtttttattagag

SEQ ID NO: 2094 - DNA, 25 bp, Artificial Sequence
  Probe
actctcagttctaacgcagggattc

SEQ ID NO: 2095 - DNA, 25 bp, Artificial Sequence
  Probe
gattcaggaattgggctttcagact

SEQ ID NO: 2096 - DNA, 25 bp, Artificial Sequence
  Probe
tccttctgcagtgtcacagtccaga

SEQ ID NO: 2097 - DNA, 25 bp, Artificial Sequence
  Probe
gcagtgtcacagtccagactttttt

SEQ ID NO: 2098 - DNA, 25 bp, Artificial Sequence
  Probe
cacagtgggtcccagggctagcagg

SEQ ID NO: 2099 - DNA, 25 bp, Artificial Sequence
  Probe
tcccagggctagcaggagcgtgctg

SEQ ID NO: 2100 - DNA, 25 bp, Artificial Sequence
  Probe
ggtgctggcaggagtgtgctggtga

SEQ ID NO: 2101 - DNA, 25 bp, Artificial Sequence
  Probe
ggcaggagtgtgctggtgagccggc

SEQ ID NO: 2102 - DNA, 25 bp, Artificial Sequence
  Probe
gctctgtctttgtaaatccttcagg

SEQ ID NO: 2103 - DNA, 25 bp, Artificial Sequence
  Probe
tgtctttgtaaatccttcaggggtc

SEQ ID NO: 2104 - DNA, 25 bp, Artificial Sequence
  Probe
atcgccgatggcactgatggctttg

SEQ ID NO: 2105 - DNA, 25 bp, Artificial Sequence
  Probe
gacaagctgaacctgcatttcaacc

SEQ ID NO: 2106 - DNA, 25 bp, Artificial Sequence
  Probe
ttcagcgaatccaccattgtctgca

SEQ ID NO: 2107 - DNA, 25 bp, Artificial Sequence
  Probe
attgtctgcaactcattggacggca

SEQ ID NO: 2108 - DNA, 25 bp, Artificial Sequence
  Probe
gcaactgggggcaagaacaacggga

SEQ ID NO: 2109 - DNA, 25 bp, Artificial Sequence
  Probe
ggagctgtcaccatgacgggggaac

SEQ ID NO: 2110 - DNA, 25 bp, Artificial Sequence
  Probe
gccagatgggcacgagctgactttt

SEQ ID NO: 2111 - DNA, 25 bp, Artificial Sequence
  Probe
gagctacctgagcgtaaggggcggg

SEQ ID NO: 2112 - DNA, 25 bp, Artificial Sequence
  Probe
taaggggcgggttcaacatgtcctc

SEQ ID NO: 2113 - DNA, 25 bp, Artificial Sequence
  Probe
gacatgaagccggggtcaaccctga

SEQ ID NO: 2114 - DNA, 25 bp, Artificial Sequence
  Probe
gaagatcacaggcagcatcgccgat

SEQ ID NO: 2115 - DNA, 25 bp, Artificial Sequence
  Probe
gaggagggctcagaggtaaccaaca

SEQ ID NO: 2116 - DNA, 25 bp, Artificial Sequence
  Probe
ggtaaccaacagcaagagtcgtgat

SEQ ID NO: 2117 - DNA, 25 bp, Artificial Sequence
  Probe
gtcgtgatgtgtacaagctgccgcc

SEQ ID NO: 2118 - DNA, 25 bp, Artificial Sequence
  Probe
cacactcatctatcgcaacatgcag

SEQ ID NO: 2119 - DNA, 25 bp, Artificial Sequence
  Probe
atctatcgcaacatgcagcgctgga

SEQ ID NO: 2120 - DNA, 25 bp, Artificial Sequence
  Probe
catgcagcgctggaaacgcatccgc

SEQ ID NO: 2121 - DNA, 25 bp, Artificial Sequence
  Probe
aaacgcatccgccagaggtggaagg

SEQ ID NO: 2122 - DNA, 25 bp, Artificial Sequence
  Probe
agcttcgttactcagaaagcatgaa

SEQ ID NO: 2123 - DNA, 25 bp, Artificial Sequence
  Probe
gaaagcatgaagatcctacgagaga

SEQ ID NO: 2124 - DNA, 25 bp, Artificial Sequence
  Probe
gatcctacgagagatgtacgaacga

SEQ ID NO: 2125 - DNA, 25 bp, Artificial Sequence
  Probe
acgagagatgtacgaacgacagtga

SEQ ID NO: 2126 - DNA, 25 bp, Artificial Sequence
  Probe
ttccaaagtctctgctgtcaagata

SEQ ID NO: 2127 - DNA, 25 bp, Artificial Sequence
  Probe
gattcgagagaaagcacgtggccat

SEQ ID NO: 2128 - DNA, 25 bp, Artificial Sequence
  Probe
acgtggccatgtatgctttaacctt

SEQ ID NO: 2129 - DNA, 25 bp, Artificial Sequence
  Probe
acatgtagtgatacctaggctgcat

SEQ ID NO: 2130 - DNA, 25 bp, Artificial Sequence
  Probe
taggctgcatttagatcaccgtgtg

SEQ ID NO: 2131 - DNA, 25 bp, Artificial Sequence
  Probe
atcaccgtgtgctcaggccaggtgt

SEQ ID NO: 2132 - DNA, 25 bp, Artificial Sequence
  Probe
gaatcctgaggtccatggaggtgca

SEQ ID NO: 2133 - DNA, 25 bp, Artificial Sequence
  Probe
gagattactcctattcacgttgaag

SEQ ID NO: 2134 - DNA, 25 bp, Artificial Sequence
  Probe
atagggttgctactcatcttttttt

SEQ ID NO: 2135 - DNA, 25 bp, Artificial Sequence
  Probe
gctctgttacctttatatacgctgc

SEQ ID NO: 2136 - DNA, 25 bp, Artificial Sequence
  Probe
tatacgctgcctcttcaatttggaa

SEQ ID NO: 2137 - DNA, 25 bp, Artificial Sequence
  Probe
gagctaacccttcttttgagaatat

SEQ ID NO: 2138 - DNA, 25 bp, Artificial Sequence
  Probe
aagtgatactactatgagcccttca

SEQ ID NO: 2139 - DNA, 25 bp, Artificial Sequence
  Probe
tatgagcccttcacagtatctaacc

SEQ ID NO: 2140 - DNA, 25 bp, Artificial Sequence
  Probe
cagtatctaaccttccctttactgc

SEQ ID NO: 2141 - DNA, 25 bp, Artificial Sequence
  Probe
ctttactgcacgctccaaatttaag

SEQ ID NO: 2142 - DNA, 25 bp, Artificial Sequence
  Probe
agagcacgagtttcacggagcaaga

SEQ ID NO: 2143 - DNA, 25 bp, Artificial Sequence
  Probe
ggctgatagagagagttttccccat

SEQ ID NO: 2144 - DNA, 25 bp, Artificial Sequence
  Probe
gctgctttcatcttggcacatagcc

SEQ ID NO: 2145 - DNA, 25 bp, Artificial Sequence
  Probe
cacctgccgttgctggggcaaaact

SEQ ID NO: 2146 - DNA, 25 bp, Artificial Sequence
  Probe
ctgctggccacacctatcagaaggt

SEQ ID NO: 2147 - DNA, 25 bp, Artificial Sequence
  Probe
agtgtttccctgtggtttaatgtgg

SEQ ID NO: 2148 - DNA, 25 bp, Artificial Sequence
  Probe
gctgggaaggattcactctctttag

SEQ ID NO: 2149 - DNA, 25 bp, Artificial Sequence
  Probe
actctctttagccccaggggagcag

SEQ ID NO: 2150 - DNA, 25 bp, Artificial Sequence
  Probe
tgaagagatgggctctgctctgaga

SEQ ID NO: 2151 - DNA, 25 bp, Artificial Sequence
  Probe
gtagggcgggcttgaaggccctgat

SEQ ID NO: 2152 - DNA, 25 bp, Artificial Sequence
  Probe
ggccctgatgggtggaccaccagcc

SEQ ID NO: 2153 - DNA, 25 bp, Artificial Sequence
  Probe
ctgacccgttgcactgaacaagacc

SEQ ID NO: 2154 - DNA, 25 bp, Artificial Sequence
  Probe
ctggttgtgcgcttaacgtgagggt

SEQ ID NO: 2155 - DNA, 25 bp, Artificial Sequence
  Probe
aacgtgagggtgggtccagtgtgcc

SEQ ID NO: 2156 - DNA, 25 bp, Artificial Sequence
  Probe
ggtcccgtgtcactgtttacatgac

SEQ ID NO: 2157 - DNA, 25 bp, Artificial Sequence
  Probe
gtgtggttatatagccctttattta

SEQ ID NO: 2158 - DNA, 25 bp, Artificial Sequence
  Probe
ttgtaaacttacggacacctctttg

SEQ ID NO: 2159 - DNA, 25 bp, Artificial Sequence
  Probe
gaggtgggtccaagcagagttgatc

SEQ ID NO: 2160 - DNA, 25 bp, Artificial Sequence
  Probe
agcagagttgatcagtccctgcctg

SEQ ID NO: 2161 - DNA, 25 bp, Artificial Sequence
  Probe
tgccctgcctaggtctagccagggg

SEQ ID NO: 2162 - DNA, 25 bp, Artificial Sequence
  Probe
gagaagaccccgggatctgctgggg

SEQ ID NO: 2163 - DNA, 25 bp, Artificial Sequence
  Probe
tggatgcggggtgaggcccgagcgc

SEQ ID NO: 2164 - DNA, 25 bp, Artificial Sequence
  Probe
cgctcacacttcgtgtagggcgggc

SEQ ID NO: 2165 - DNA, 25 bp, Artificial Sequence
  Probe
ctgccctgcgcagtatttattgcta

SEQ ID NO: 2166 - DNA, 25 bp, Artificial Sequence
  Probe
attattgtccaggaggggcagcact

SEQ ID NO: 2167 - DNA, 25 bp, Artificial Sequence
  Probe
tctgctagtccctgaagcctttaac

SEQ ID NO: 2168 - DNA, 25 bp, Artificial Sequence
  Probe
tgaagcctttaaccaaacgggagtg

SEQ ID NO: 2169 - DNA, 25 bp, Artificial Sequence
  Probe
aacaggacaagggctgcccgcgtgt

SEQ ID NO: 2170 - DNA, 25 bp, Artificial Sequence
  Probe
ccacgagttcacctatgcactgatg

SEQ ID NO: 2171 - DNA, 25 bp, Artificial Sequence
  Probe
cgcacaagggctctttccaggatgc

SEQ ID NO: 2172 - DNA, 25 bp, Artificial Sequence
  Probe
ggatgctggcgttatccaagctgcc

SEQ ID NO: 2173 - DNA, 25 bp, Artificial Sequence
  Probe
aagctgcctacagcctaaacttccc

SEQ ID NO: 2174 - DNA, 25 bp, Artificial Sequence
  Probe
ttcacccgcggtcgtattggagacc

SEQ ID NO: 2175 - DNA, 25 bp, Artificial Sequence
  Probe
cctgaggctgtatgaggcccacggc

SEQ ID NO: 2176 - DNA, 25 bp, Artificial Sequence
  Probe
cggcagccacgtggactgctggctg

SEQ ID NO: 2177 - DNA, 25 bp, Artificial Sequence
  Probe
tctgcgatctcttggagcgaccaga

SEQ ID NO: 2178 - DNA, 25 bp, Artificial Sequence
  Probe
ctctggggactcctaatttctgctt

SEQ ID NO: 2179 - DNA, 25 bp, Artificial Sequence
  Probe
gcttccccagcctaaagcagggatc

SEQ ID NO: 2180 - DNA, 25 bp, Artificial Sequence
  Probe
agcagggatcagtcttttcttgtgg

SEQ ID NO: 2181 - DNA, 25 bp, Artificial Sequence
  Probe
tggaagggtgtcagggtctgggctc

SEQ ID NO: 2182 - DNA, 25 bp, Artificial Sequence
  Probe
atcatctgtcttctctaagttaggg

SEQ ID NO: 2183 - DNA, 25 bp, Artificial Sequence
  Probe
aggaaatcatcctgagcactcacag

SEQ ID NO: 2184 - DNA, 25 bp, Artificial Sequence
  Probe
gagcactcacaggttcatttaacac

SEQ ID NO: 2185 - DNA, 25 bp, Artificial Sequence
  Probe
tttaacactcactcatcaagcacct

SEQ ID NO: 2186 - DNA, 25 bp, Artificial Sequence
  Probe
gaagagttcctgtcctgaagcttcc

SEQ ID NO: 2187 - DNA, 25 bp, Artificial Sequence
  Probe
tctggtgtggccttgtagctagtgc

SEQ ID NO: 2188 - DNA, 25 bp, Artificial Sequence
  Probe
gtgcctgggcacaggtgtttttctt

SEQ ID NO: 2189 - DNA, 25 bp, Artificial Sequence
  Probe
gttttacctagtgctgggagttcag

SEQ ID NO: 2190 - DNA, 25 bp, Artificial Sequence
  Probe
tgggagttcagttctttttcctcta

SEQ ID NO: 2191 - DNA, 25 bp, Artificial Sequence
  Probe
agagcctaatttttcccagatgcat

SEQ ID NO: 2192 - DNA, 25 bp, Artificial Sequence
  Probe
gggtccttctccttatgtgggaaat

SEQ ID NO: 2193 - DNA, 25 bp, Artificial Sequence
  Probe
gtcggttgggagaaactagctctga

SEQ ID NO: 2194 - DNA, 25 bp, Artificial Sequence
  Probe
ctagctctgatcctaacaggccacg

SEQ ID NO: 2195 - DNA, 25 bp, Artificial Sequence
  Probe
acaggccacgttaaactgcccatct

SEQ ID NO: 2196 - DNA, 25 bp, Artificial Sequence
  Probe
aaactgcccatctggagaatcgcct

SEQ ID NO: 2197 - DNA, 25 bp, Artificial Sequence
  Probe
ctggagaatcgcctgcaggtggggc

SEQ ID NO: 2198 - DNA, 25 bp, Artificial Sequence
  Probe
ggatgctctaacgaattaccacaaa

SEQ ID NO: 2199 - DNA, 25 bp, Artificial Sequence
  Probe
ttccccagcttattgctgcatcact

SEQ ID NO: 2200 - DNA, 25 bp, Artificial Sequence
  Probe
gttctctcctcttttaacaacagtc

SEQ ID NO: 2201 - DNA, 25 bp, Artificial Sequence
  Probe
cccaccctaatcctgtgtgatctta

SEQ ID NO: 2202 - DNA, 25 bp, Artificial Sequence
  Probe
gtgtgatcttatcttgatccttatt

SEQ ID NO: 2203 - DNA, 25 bp, Artificial Sequence
  Probe
ccgggggcctatggcagtgatgctg

SEQ ID NO: 2204 - DNA, 25 bp, Artificial Sequence
  Probe
ggggcctatggcagtgatgctgtgt

SEQ ID NO: 2205 - DNA, 25 bp, Artificial Sequence
  Probe
cctatggcagtgatgctgtgttggt

SEQ ID NO: 2206 - DNA, 25 bp, Artificial Sequence
  Probe
caaacctggtggattgaaacagcag

SEQ ID NO: 2207 - DNA, 25 bp, Artificial Sequence
  Probe
gaaacagcagaacttgattccctta

SEQ ID NO: 2208 - DNA, 25 bp, Artificial Sequence
  Probe
agcagaacttgattcccttacagtt

SEQ ID NO: 2209 - DNA, 25 bp, Artificial Sequence
  Probe
cagggctgtggtccctttgaaggct

SEQ ID NO: 2210 - DNA, 25 bp, Artificial Sequence
  Probe
ccttggctctttttagcttgtggcg

SEQ ID NO: 2211 - DNA, 25 bp, Artificial Sequence
  Probe
tggctctttttagcttgtggcggca

SEQ ID NO: 2212 - DNA, 25 bp, Artificial Sequence
  Probe
ttagcttgtggcggcagtgggcagt

SEQ ID NO: 2213 - DNA, 25 bp, Artificial Sequence
  Probe
tgatccttattaattaaacctgcaa

SEQ ID NO: 2214 - DNA, 25 bp, Artificial Sequence
  Probe
gagtccagtcgaagattgggtccct

SEQ ID NO: 2215 - DNA, 25 bp, Artificial Sequence
  Probe
tccctggacaatatcacccacgtcc

SEQ ID NO: 2216 - DNA, 25 bp, Artificial Sequence
  Probe
aagacagaccacggggcggagatcg

SEQ ID NO: 2217 - DNA, 25 bp, Artificial Sequence
  Probe
cggagatcgtgtacaagtcgccagt

SEQ ID NO: 2218 - DNA, 25 bp, Artificial Sequence
  Probe
agtcgccagtggtgtctggggacac

SEQ ID NO: 2219 - DNA, 25 bp, Artificial Sequence
  Probe
tccaccggcagcatcgacatggtag

SEQ ID NO: 2220 - DNA, 25 bp, Artificial Sequence
  Probe
gctagctgacgaggtgtctgcctcc

SEQ ID NO: 2221 - DNA, 25 bp, Artificial Sequence
  Probe
gcctccctggccaagcagggtttgt

SEQ ID NO: 2222 - DNA, 25 bp, Artificial Sequence
  Probe
tgtgatcaggcccctggggcggtca

SEQ ID NO: 2223 - DNA, 25 bp, Artificial Sequence
  Probe
gctcctcgcagttcggttaattggt

SEQ ID NO: 2224 - DNA, 25 bp, Artificial Sequence
  Probe
atcacttaacctgcttttgtcactc

SEQ ID NO: 2225 - DNA, 25 bp, Artificial Sequence
  Probe
caggctgggtgtcttggttgtcagt

SEQ ID NO: 2226 - DNA, 25 bp, Artificial Sequence
  Probe
ggatggaagggcaaggcacccaggg

SEQ ID NO: 2227 - DNA, 25 bp, Artificial Sequence
  Probe
atggaagggcaaggcacccagggca

SEQ ID NO: 2228 - DNA, 25 bp, Artificial Sequence
  Probe
ctgctcagctccacatgcatagtat

SEQ ID NO: 2229 - DNA, 25 bp, Artificial Sequence
  Probe
ctcagctccacatgcatagtatcag

SEQ ID NO: 2230 - DNA, 25 bp, Artificial Sequence
  Probe
gctccacatgcatagtatcagccct

SEQ ID NO: 2231 - DNA, 25 bp, Artificial Sequence
  Probe
tccacacccgacaaaggggaacaca

SEQ ID NO: 2232 - DNA, 25 bp, Artificial Sequence
  Probe
agttgtagttggatttgtctgttta

SEQ ID NO: 2233 - DNA, 25 bp, Artificial Sequence
  Probe
gttggatttgtctgtttatgcttgg

SEQ ID NO: 2234 - DNA, 25 bp, Artificial Sequence
  Probe
gatttgtctgtttatgcttggattc

SEQ ID NO: 2235 - DNA, 25 bp, Artificial Sequence
  Probe
tgtctgtttatgcttggattcacca

SEQ ID NO: 2236 - DNA, 25 bp, Artificial Sequence
  Probe
gcctggcaggagggttggcacttcg

SEQ ID NO: 2237 - DNA, 25 bp, Artificial Sequence
  Probe
gactgaccttgatgtcttgagagcg

SEQ ID NO: 2238 - DNA, 25 bp, Artificial Sequence
  Probe
ttgatgtcttgagagcgctggcctc

SEQ ID NO: 2239 - DNA, 25 bp, Artificial Sequence
  Probe
tctgaaggttggaactgctgccatg

SEQ ID NO: 2240 - DNA, 25 bp, Artificial Sequence
  Probe
actgctgccatgattttggccactt

SEQ ID NO: 2241 - DNA, 25 bp, Artificial Sequence
  Probe
ccactttgcagacctgggactttag

SEQ ID NO: 2242 - DNA, 25 bp, Artificial Sequence
  Probe
gcagacctgggactttagggctaac

SEQ ID NO: 2243 - DNA, 25 bp, Artificial Sequence
  Probe
tagggctaaccagttctctttgtaa

SEQ ID NO: 2244 - DNA, 25 bp, Artificial Sequence
  Probe
accagttctctttgtaaggacttgt

SEQ ID NO: 2245 - DNA, 25 bp, Artificial Sequence
  Probe
taaggacttgtgcctcttgggagac

SEQ ID NO: 2246 - DNA, 25 bp, Artificial Sequence
  Probe
gcatctctggagtgtgtgggggtct

SEQ ID NO: 2247 - DNA, 25 bp, Artificial Sequence
  Probe
gcagcatcgacatggtagactcgcc

SEQ ID NO: 2248 - DNA, 25 bp, Artificial Sequence
  Probe
gctagctgacgaggtgtctgcctcc

SEQ ID NO: 2249 - DNA, 25 bp, Artificial Sequence
  Probe
aggtggcagtggtccgtactccacc

SEQ ID NO: 2250 - DNA, 25 bp, Artificial Sequence
  Probe
gtccaagatcggctccactgagaac

SEQ ID NO: 2251 - DNA, 25 bp, Artificial Sequence
  Probe
actgagaacctgaagcaccagccgg

SEQ ID NO: 2252 - DNA, 25 bp, Artificial Sequence
  Probe
gacctgagcaaggtgacctccaagt

SEQ ID NO: 2253 - DNA, 25 bp, Artificial Sequence
  Probe
ggctcattaggcaacatccatcata

SEQ ID NO: 2254 - DNA, 25 bp, Artificial Sequence
  Probe
gagtccagtcgaagattgggtccct

SEQ ID NO: 2255 - DNA, 25 bp, Artificial Sequence
  Probe
tccctggacaatatcacccacgtcc

SEQ ID NO: 2256 - DNA, 25 bp, Artificial Sequence
  Probe
cggagatcgtgtacaagtcgccagt

SEQ ID NO: 2257 - DNA, 25 bp, Artificial Sequence
  Probe
agtcgccagtggtgtctggggacac

SEQ ID NO: 2258 - DNA, 25 bp, Artificial Sequence
  Probe
tatggacatctggttgctttggcct

SEQ ID NO: 2259 - DNA, 25 bp, Artificial Sequence
  Probe
tcaggggtcctaagcccacaatcat

SEQ ID NO: 2260 - DNA, 25 bp, Artificial Sequence
  Probe
tcatgcctccctaagaccttggcat

SEQ ID NO: 2261 - DNA, 25 bp, Artificial Sequence
  Probe
gctccagacacacagcctgtgcttt

SEQ ID NO: 2262 - DNA, 25 bp, Artificial Sequence
  Probe
ttggagctgagatcactcgcttcac

SEQ ID NO: 2263 - DNA, 25 bp, Artificial Sequence
  Probe
tcctcatctttgttctccaagtaaa

SEQ ID NO: 2264 - DNA, 25 bp, Artificial Sequence
  Probe
gtaaagccacgaggtcggggcgagg

SEQ ID NO: 2265 - DNA, 25 bp, Artificial Sequence
  Probe
gcagaggtgatcacctgcgtgtccc

SEQ ID NO: 2266 - DNA, 25 bp, Artificial Sequence
  Probe
gcctcacctcctaatagacttagcc

SEQ ID NO: 2267 - DNA, 25 bp, Artificial Sequence
  Probe
gagcaggactatttctggcacttgc

SEQ ID NO: 2268 - DNA, 25 bp, Artificial Sequence
  Probe
gcaagtcccatgatttcttcggtaa

SEQ ID NO: 2269 - DNA, 25 bp, Artificial Sequence
  Probe
tttcctctgcctgactagacaatga

SEQ ID NO: 2270 - DNA, 25 bp, Artificial Sequence
  Probe
gaatttgtcacgactgtgcagcagc

SEQ ID NO: 2271 - DNA, 25 bp, Artificial Sequence
  Probe
gctgctgtcatcaaggctcgaaaac

SEQ ID NO: 2272 - DNA, 25 bp, Artificial Sequence
  Probe
aaactatccagtgccatgtctgctg

SEQ ID NO: 2273 - DNA, 25 bp, Artificial Sequence
  Probe
ctgcaaaagccatctgtgaccacgt

SEQ ID NO: 2274 - DNA, 25 bp, Artificial Sequence
  Probe
gtgaccacgtcagggacatctggtt

SEQ ID NO: 2275 - DNA, 25 bp, Artificial Sequence
  Probe
gtttgtgtccatgggtgttatctct

SEQ ID NO: 2276 - DNA, 25 bp, Artificial Sequence
  Probe
tgatggcaactcctatggtgttcct

SEQ ID NO: 2277 - DNA, 25 bp, Artificial Sequence
  Probe
tcctgatgatctgctctactcattc

SEQ ID NO: 2278 - DNA, 25 bp, Artificial Sequence
  Probe
ctactcattccctgttgtaatcaag

SEQ ID NO: 2279 - DNA, 25 bp, Artificial Sequence
  Probe
aaggtctccctattaatgatttctc

SEQ ID NO: 2280 - DNA, 25 bp, Artificial Sequence
  Probe
agtttttagttgcgctttatgggtg

SEQ ID NO: 2281 - DNA, 25 bp, Artificial Sequence
  Probe
tgcgctttatgggtggatgctgaat

SEQ ID NO: 2282 - DNA, 25 bp, Artificial Sequence
  Probe
gtgatcatattgtctaccatgtagc

SEQ ID NO: 2283 - DNA, 25 bp, Artificial Sequence
  Probe
gtctaccatgtagccagctttcaat

SEQ ID NO: 2284 - DNA, 25 bp, Artificial Sequence
  Probe
gtagccagctttcaattatatgtaa

SEQ ID NO: 2285 - DNA, 25 bp, Artificial Sequence
  Probe
taagagggactttttgacatttaca

SEQ ID NO: 2286 - DNA, 25 bp, Artificial Sequence
  Probe
gatatctgaaagcaccagcacttgg

SEQ ID NO: 2287 - DNA, 25 bp, Artificial Sequence
  Probe
gcaagcagatgggaggcgtgttcag

SEQ ID NO: 2288 - DNA, 25 bp, Artificial Sequence
  Probe
gaggcgtgttcagtaacttattcat

SEQ ID NO: 2289 - DNA, 25 bp, Artificial Sequence
  Probe
gaaatgattgctgtactcaaatatt

SEQ ID NO: 2290 - DNA, 25 bp, Artificial Sequence
  Probe
gaaaaccatagttgattgcctacac

SEQ ID NO: 2291 - DNA, 25 bp, Artificial Sequence
  Probe
acttctgcttaagaggcttctatgt

SEQ ID NO: 2292 - DNA, 25 bp, Artificial Sequence
  Probe
ggtacctgtaatttagccatttcct

SEQ ID NO: 2293 - DNA, 25 bp, Artificial Sequence
  Probe
agatgtaagcttgagcccatcctct

SEQ ID NO: 2294 - DNA, 25 bp, Artificial Sequence
  Probe
gactgttagttttccagttcctact

SEQ ID NO: 2295 - DNA, 25 bp, Artificial Sequence
  Probe
cagttcctactggaggcaaattctt

SEQ ID NO: 2296 - DNA, 25 bp, Artificial Sequence
  Probe
ggcaaattctttgtttaccactgtt

SEQ ID NO: 2297 - DNA, 25 bp, Artificial Sequence
  Probe
gtttaccactgttctctgtatttca

SEQ ID NO: 2298 - DNA, 25 bp, Artificial Sequence
  Probe
aaaagccttctctatatatcagtat

SEQ ID NO: 2299 - DNA, 25 bp, Artificial Sequence
  Probe
gggatggtacgaggctgtattattt

SEQ ID NO: 2300 - DNA, 25 bp, Artificial Sequence
  Probe
gaaatggtcccatagcttagcatgt

SEQ ID NO: 2301 - DNA, 25 bp, Artificial Sequence
  Probe
ccagaaggcatactttccatccatc

SEQ ID NO: 2302 - DNA, 25 bp, Artificial Sequence
  Probe
aaaaactggctttaaagcaggagct

SEQ ID NO: 2303 - DNA, 25 bp, Artificial Sequence
  Probe
ggcccctaagccagacggggactag

SEQ ID NO: 2304 - DNA, 25 bp, Artificial Sequence
  Probe
aagccagacggggactagctttggc

SEQ ID NO: 2305 - DNA, 25 bp, Artificial Sequence
  Probe
tgagacggagtcttgctctgtggct

SEQ ID NO: 2306 - DNA, 25 bp, Artificial Sequence
  Probe
gctctgtggctcaggctggagtaca

SEQ ID NO: 2307 - DNA, 25 bp, Artificial Sequence
  Probe
ctcctggctgtgttcaagtggttct

SEQ ID NO: 2308 - DNA, 25 bp, Artificial Sequence
  Probe
agctggggttagagcaccctgtcac

SEQ ID NO: 2309 - DNA, 25 bp, Artificial Sequence
  Probe
cgccccgctaattttgtatttctag

SEQ ID NO: 2310 - DNA, 25 bp, Artificial Sequence
  Probe
gatgaagtttcactatgttggccag

SEQ ID NO: 2311 - DNA, 25 bp, Artificial Sequence
  Probe
tagtgtgtaggtctgtaggcttttg

SEQ ID NO: 2312 - DNA, 25 bp, Artificial Sequence
  Probe
tgtaggcttttgatggtaaccacaa

SEQ ID NO: 2313 - DNA, 25 bp, Artificial Sequence
  Probe
gatctcatcttgtcttgtttttcta

SEQ ID NO: 2314 - DNA, 25 bp, Artificial Sequence
  Probe
gtcttgtttttctaaggcaggagag

SEQ ID NO: 2315 - DNA, 25 bp, Artificial Sequence
  Probe
tttttttccctcattgacacagaag

SEQ ID NO: 2316 - DNA, 25 bp, Artificial Sequence
  Probe
tttccctcattgacacagaagacaa

SEQ ID NO: 2317 - DNA, 25 bp, Artificial Sequence
  Probe
gacaaacacagaagtctttttaaag

SEQ ID NO: 2318 - DNA, 25 bp, Artificial Sequence
  Probe
aatacatccaatacattatagagac

SEQ ID NO: 2319 - DNA, 25 bp, Artificial Sequence
  Probe
catggagatggctggaataaacaat

SEQ ID NO: 2320 - DNA, 25 bp, Artificial Sequence
  Probe
ataaacaggagctttggagccagca

SEQ ID NO: 2321 - DNA, 25 bp, Artificial Sequence
  Probe
gagccagcacccgtgatgttagttc

SEQ ID NO: 2322 - DNA, 25 bp, Artificial Sequence
  Probe
cacccgtgatgttagttcttctcat

SEQ ID NO: 2323 - DNA, 25 bp, Artificial Sequence
  Probe
gatgttagttcttctcatgcaaatg

SEQ ID NO: 2324 - DNA, 25 bp, Artificial Sequence
  Probe
cccctcaaacttctgtgcacaaagt

SEQ ID NO: 2325 - DNA, 25 bp, Artificial Sequence
  Probe
ttctgtgcacaaagtgctcccttcc

SEQ ID NO: 2326 - DNA, 25 bp, Artificial Sequence
  Probe
gccccatcggtgtgtaaggtggcct

SEQ ID NO: 2327 - DNA, 25 bp, Artificial Sequence
  Probe
cggtgtgtaaggtggcctattcctc

SEQ ID NO: 2328 - DNA, 25 bp, Artificial Sequence
  Probe
tgtgtaaggtggcctattcctctgt

SEQ ID NO: 2329 - DNA, 25 bp, Artificial Sequence
  Probe
gccatgctgactgagtgactggaga

SEQ ID NO: 2330 - DNA, 25 bp, Artificial Sequence
  Probe
catgctgactgagtgactggagaca

SEQ ID NO: 2331 - DNA, 25 bp, Artificial Sequence
  Probe
gactggagacagggatgatggagag

SEQ ID NO: 2332 - DNA, 25 bp, Artificial Sequence
  Probe
gacagggatgatggagagttcatga

SEQ ID NO: 2333 - DNA, 25 bp, Artificial Sequence
  Probe
gcagcaactctatggtagggggaga

SEQ ID NO: 2334 - DNA, 25 bp, Artificial Sequence
  Probe
atggtagggggagagggacctgccg

SEQ ID NO: 2335 - DNA, 25 bp, Artificial Sequence
  Probe
tcctgggaggccttagctctagagt

SEQ ID NO: 2336 - DNA, 25 bp, Artificial Sequence
  Probe
ccactccccacagttttaggatcta

SEQ ID NO: 2337 - DNA, 25 bp, Artificial Sequence
  Probe
gaactattcttctagactatcccac

SEQ ID NO: 2338 - DNA, 25 bp, Artificial Sequence
  Probe
agactatcccacatcagaatcactg

SEQ ID NO: 2339 - DNA, 25 bp, Artificial Sequence
  Probe
gaatcctcactcagggtggggtcag

SEQ ID NO: 2340 - DNA, 25 bp, Artificial Sequence
  Probe
aatctgcattttaactagtcgcggg

SEQ ID NO: 2341 - DNA, 25 bp, Artificial Sequence
  Probe
tagtcgcggggattgtggggggcag

SEQ ID NO: 2342 - DNA, 25 bp, Artificial Sequence
  Probe
tccaccccaggaccaatatgttcag

SEQ ID NO: 2343 - DNA, 25 bp, Artificial Sequence
  Probe
gatggcctgaaccccatgggtagag

SEQ ID NO: 2344 - DNA, 25 bp, Artificial Sequence
  Probe
tagagtcacttaggggccacttcct

SEQ ID NO: 2345 - DNA, 25 bp, Artificial Sequence
  Probe
taagttgctgtccagcctcagtgac

SEQ ID NO: 2346 - DNA, 25 bp, Artificial Sequence
  probe
gtggtagacatgtccttccatgact

SEQ ID NO: 2347 - DNA, 25 bp, Artificial Sequence
  probe
tccttccatgactaatttctaattg

SEQ ID NO: 2348 - DNA, 25 bp, Artificial Sequence
  probe
ccctcctcagtgactttaactagct

SEQ ID NO: 2349 - DNA, 25 bp, Artificial Sequence
  probe
taactagctcagaaacgtactcccc

SEQ ID NO: 2350 - DNA, 25 bp, Artificial Sequence
  probe
gttctgggagagcattgttattaag

SEQ ID NO: 2351 - DNA, 25 bp, Artificial Sequence
  probe
gacagtcttgatattatacattttc

SEQ ID NO: 2352 - DNA, 25 bp, Artificial Sequence
  probe
gagtgcttttgggcatccaacagtt

SEQ ID NO: 2353 - DNA, 25 bp, Artificial Sequence
  probe
ggcatccaacagttaatcacttatg

SEQ ID NO: 2354 - DNA, 25 bp, Artificial Sequence
  probe
tttagagcatgcaatcttaactttg

SEQ ID NO: 2355 - DNA, 25 bp, Artificial Sequence
  probe
ttttctctccacatcaggatagttt

SEQ ID NO: 2356 - DNA, 25 bp, Artificial Sequence
  probe
actgaagcacaatctcttatactag

SEQ ID NO: 2357 - DNA, 25 bp, Artificial Sequence
  probe
gaaggcctgaactaacattgtggta

SEQ ID NO: 2358 - DNA, 25 bp, Artificial Sequence
  probe
gatggttctctgggttcctgataaa

SEQ ID NO: 2359 - DNA, 25 bp, Artificial Sequence
  probe
agggcaattccaagagggcaactcc

SEQ ID NO: 2360 - DNA, 25 bp, Artificial Sequence
  probe
ttcaggttccagtcatgcggtgttg

SEQ ID NO: 2361 - DNA, 25 bp, Artificial Sequence
  probe
cggtgttggagatgcctgtgtcatc

SEQ ID NO: 2362 - DNA, 25 bp, Artificial Sequence
  probe
gatgaagactagtacgcagctggat

SEQ ID NO: 2363 - DNA, 25 bp, Artificial Sequence
  probe
gcagctggatagcagagtccgaaac

SEQ ID NO: 2364 - DNA, 25 bp, Artificial Sequence
  probe
gaatgttctagctaatatctcaact

SEQ ID NO: 2365 - DNA, 25 bp, Artificial Sequence
  probe
acttagaatccatctcactaccaat

SEQ ID NO: 2366 - DNA, 25 bp, Artificial Sequence
  probe
taccaatgggcaaacacttgtgttc

SEQ ID NO: 2367 - DNA, 25 bp, Artificial Sequence
  probe
gtttgaacattttgtgtacttccaa

SEQ ID NO: 2368 - DNA, 25 bp, Artificial Sequence
  probe
gcatggagagccaagcctacagcgg

SEQ ID NO: 2369 - DNA, 25 bp, Artificial Sequence
  probe
tacagcgggtcccagtagccaagat

SEQ ID NO: 2370 - DNA, 25 bp, Artificial Sequence
  probe
cctgccccctgaatggtatgtggtg

SEQ ID NO: 2371 - DNA, 25 bp, Artificial Sequence
  probe
gtgcctccagggaccaagtgtgaga

SEQ ID NO: 2372 - DNA, 25 bp, Artificial Sequence
  probe
ggcctttctgaatgttatctccaac

SEQ ID NO: 2373 - DNA, 25 bp, Artificial Sequence
  probe
tgcactgagggactgttggcccctg

SEQ ID NO: 2374 - DNA, 25 bp, Artificial Sequence
  probe
tgtgagggtgactacgggggcccac

SEQ ID NO: 2375 - DNA, 25 bp, Artificial Sequence
  probe
gctttacccacaactgctgggtcct

SEQ ID NO: 2376 - DNA, 25 bp, Artificial Sequence
  probe
taatccccaaccgagtatgcgcaag

SEQ ID NO: 2377 - DNA, 25 bp, Artificial Sequence
  probe
tcacgcgtgtctctgtgtttgtgga

SEQ ID NO: 2378 - DNA, 25 bp, Artificial Sequence
  probe
ttaggcccagccttgatgccatatg

SEQ ID NO: 2379 - DNA, 25 bp, Artificial Sequence
  probe
catggagagccaggcctacagcggg

SEQ ID NO: 2380 - DNA, 25 bp, Artificial Sequence
  probe
tacagcgggtcccagtagccaagat

SEQ ID NO: 2381 - DNA, 25 bp, Artificial Sequence
  probe
tagccaagatgctgtgtgggccctc

SEQ ID NO: 2382 - DNA, 25 bp, Artificial Sequence
  probe
aaatgtggccttgctgaacgtcatc

SEQ ID NO: 2383 - DNA, 25 bp, Artificial Sequence
  probe
gaacgtcatctccaaccaggagtgt

SEQ ID NO: 2384 - DNA, 25 bp, Artificial Sequence
  probe
tgcactgagggactgttggcccctg

SEQ ID NO: 2385 - DNA, 25 bp, Artificial Sequence
  probe
gctttacccacaactgctgggtcct

SEQ ID NO: 2386 - DNA, 25 bp, Artificial Sequence
  probe
gaattagaatccccaaccgagtatg

SEQ ID NO: 2387 - DNA, 25 bp, Artificial Sequence
  probe
tcacgcgtgtctctgtgtttgtgga

SEQ ID NO: 2388 - DNA, 25 bp, Artificial Sequence
  probe
gagactgggttaggcccagccttga

SEQ ID NO: 2389 - DNA, 25 bp, Artificial Sequence
  probe
gccttgacgccatatgctttgggga

SEQ ID NO: 2390 - DNA, 25 bp, Artificial Sequence
  probe
gcatggagagccaagcctacagcgg

SEQ ID NO: 2391 - DNA, 25 bp, Artificial Sequence
  probe
tacagcgggtcccagtagccaagat

SEQ ID NO: 2392 - DNA, 25 bp, Artificial Sequence
  probe
cctgccccctgaatggtatgtggtg

SEQ ID NO: 2393 - DNA, 25 bp, Artificial Sequence
  probe
gtgcctccagggaccaagtgtgaga

SEQ ID NO: 2394 - DNA, 25 bp, Artificial Sequence
  probe
atgtggccttgctgaatgtcatctc

SEQ ID NO: 2395 - DNA, 25 bp, Artificial Sequence
  probe
tgcactgagggactgttggcccctg

SEQ ID NO: 2396 - DNA, 25 bp, Artificial Sequence
  probe
tgtgagggtgactacgggggcccac

SEQ ID NO: 2397 - DNA, 25 bp, Artificial Sequence
  probe
gctttacccacaactgctgggtcct

SEQ ID NO: 2398 - DNA, 25 bp, Artificial Sequence
  probe
taatccccaaccgagtatgcgcaag

SEQ ID NO: 2399 - DNA, 25 bp, Artificial Sequence
  probe
tcacgcgtgtctctgtgtttgtgga

SEQ ID NO: 2400 - DNA, 25 bp, Artificial Sequence
  probe
ttaggcccagccttgatgccatatg

SEQ ID NO: 2401 - DNA, 25 bp, Artificial Sequence
  probe
cccctatgtccagtgcctggaagac

SEQ ID NO: 2402 - DNA, 25 bp, Artificial Sequence
  probe
atgcaggagaaagcccggcagctcc

SEQ ID NO: 2403 - DNA, 25 bp, Artificial Sequence
  probe
gaccctcatcttgtcctgaggtgtt

SEQ ID NO: 2404 - DNA, 25 bp, Artificial Sequence
  probe
tgaggtgttgagggtgtcacgagcc

SEQ ID NO: 2405 - DNA, 25 bp, Artificial Sequence
  probe
ggttgtgggggcagagggggtctgt

SEQ ID NO: 2406 - DNA, 25 bp, Artificial Sequence
  probe
gggtctgtgaatctgagagtcattc

SEQ ID NO: 2407 - DNA, 25 bp, Artificial Sequence
  probe
cattcaggtgacctcctgcagggag

SEQ ID NO: 2408 - DNA, 25 bp, Artificial Sequence
  probe
ccagactctcaggtggaggcaacag

SEQ ID NO: 2409 - DNA, 25 bp, Artificial Sequence
  probe
gaggcaacagggccatgtgctgccc

SEQ ID NO: 2410 - DNA, 25 bp, Artificial Sequence
  probe
cggctcctggtgctaacaacaaagt

SEQ ID NO: 2411 - DNA, 25 bp, Artificial Sequence
  probe
agaccctgcttaggatgggggatgt

SEQ ID NO: 2412 - DNA, 25 bp, Artificial Sequence
  probe
tcttacctgccaacatattcaccat

SEQ ID NO: 2413 - DNA, 25 bp, Artificial Sequence
  probe
gcaacctaaattactttcgctctct

SEQ ID NO: 2414 - DNA, 25 bp, Artificial Sequence
  probe
actttcgctctctaatcagcatttc

SEQ ID NO: 2415 - DNA, 25 bp, Artificial Sequence
  probe
attgtgtcggaccctacttttgaga

SEQ ID NO: 2416 - DNA, 25 bp, Artificial Sequence
  probe
tgggaactggctattccttgtcccg

SEQ ID NO: 2417 - DNA, 25 bp, Artificial Sequence
  probe
ttgataagcactcctagtctctggc

SEQ ID NO: 2418 - DNA, 25 bp, Artificial Sequence
  probe
tagtctctggcctgtggatccagtg

SEQ ID NO: 2419 - DNA, 25 bp, Artificial Sequence
  probe
tggatccagtgctattctgtcacca

SEQ ID NO: 2420 - DNA, 25 bp, Artificial Sequence
  probe
aagaatcccaattgcaccttctgtt

SEQ ID NO: 2421 - DNA, 25 bp, Artificial Sequence
  probe
gcaccttctgtttctgacagtcaca

SEQ ID NO: 2422 - DNA, 25 bp, Artificial Sequence
  probe
gcatcaccctgctaatacataataa

SEQ ID NO: 2423 - DNA, 25 bp, Artificial Sequence
  probe
tctcgccggcggatgacgagctgta

SEQ ID NO: 2424 - DNA, 25 bp, Artificial Sequence
  probe
cgagctgtatcagcggacgcgcatc

SEQ ID NO: 2425 - DNA, 25 bp, Artificial Sequence
  probe
gaggccgctcaggcaatgtacatcg

SEQ ID NO: 2426 - DNA, 25 bp, Artificial Sequence
  probe
aacagccgcggcttcatgataaacg

SEQ ID NO: 2427 - DNA, 25 bp, Artificial Sequence
  probe
tcccgcactcggtggtgcagtggaa

SEQ ID NO: 2428 - DNA, 25 bp, Artificial Sequence
  probe
acatcaccgaagacagcttttccct

SEQ ID NO: 2429 - DNA, 25 bp, Artificial Sequence
  probe
gttgctggagccccggatagagatc

SEQ ID NO: 2430 - DNA, 25 bp, Artificial Sequence
  probe
tggagaccggaccgagaggctgcag

SEQ ID NO: 2431 - DNA, 25 bp, Artificial Sequence
  probe
caggagggacttcacttacatcttt

SEQ ID NO: 2432 - DNA, 25 bp, Artificial Sequence
  probe
caagctgctcaatgaaccgccagga

SEQ ID NO: 2433 - DNA, 25 bp, Artificial Sequence
  probe
ccgccaggaactgacctgctgactg

SEQ ID NO: 2434 - DNA, 25 bp, Artificial Sequence
  probe
gttgcggctttataagcgggcgcta

SEQ ID NO: 2435 - DNA, 25 bp, Artificial Sequence
  probe
tcgagtcgtggtgcgtccagagaga

SEQ ID NO: 2436 - DNA, 25 bp, Artificial Sequence
  probe
aataccgatactttgcttgtttgat

SEQ ID NO: 2437 - DNA, 25 bp, Artificial Sequence
  probe
tgggggcacctcctatgagagatac

SEQ ID NO: 2438 - DNA, 25 bp, Artificial Sequence
  probe
gagatacgattgctacaaggtccca

SEQ ID NO: 2439 - DNA, 25 bp, Artificial Sequence
  probe
ggtgcttagatgactggcatccttc

SEQ ID NO: 2440 - DNA, 25 bp, Artificial Sequence
  probe
aatgtatcctgattactttgccaag

SEQ ID NO: 2441 - DNA, 25 bp, Artificial Sequence
  probe
tggtcctttaactgaagctttgccc

SEQ ID NO: 2442 - DNA, 25 bp, Artificial Sequence
  probe
gatttgcccccactgtggtggtata

SEQ ID NO: 2443 - DNA, 25 bp, Artificial Sequence
  probe
gtggtatattgtgaccagaccccgg

SEQ ID NO: 2444 - DNA, 25 bp, Artificial Sequence
  probe
gagagagacctcatctttcatgctt

SEQ ID NO: 2445 - DNA, 25 bp, Artificial Sequence
  probe
gtatgtgaacatgcaggatcccgag

SEQ ID NO: 2446 - DNA, 25 bp, Artificial Sequence
  probe
gaacatgcaggatcccgagatggac

SEQ ID NO: 2447 - DNA, 25 bp, Artificial Sequence
  probe
atgcaggatcccgagatggacatga

SEQ ID NO: 2448 - DNA, 25 bp, Artificial Sequence
  probe
ggatcccgagatggacatgaagtca

SEQ ID NO: 2449 - DNA, 25 bp, Artificial Sequence
  probe
gagatggacatgaagtcagtgactg

SEQ ID NO: 2450 - DNA, 25 bp, Artificial Sequence
  probe
gaagtcagtgactgaccgggcagcc

SEQ ID NO: 2451 - DNA, 25 bp, Artificial Sequence
  probe
ccatcaactacccgttcgagaaggg

SEQ ID NO: 2452 - DNA, 25 bp, Artificial Sequence
  probe
gtacccatccggggaggagcgttgc

SEQ ID NO: 2453 - DNA, 25 bp, Artificial Sequence
  probe
cccatccggggaggagcgttgcatt

SEQ ID NO: 2454 - DNA, 25 bp, Artificial Sequence
  probe
catccggggaggagcgttgcattgc

SEQ ID NO: 2455 - DNA, 25 bp, Artificial Sequence
  probe
aggagcgttgcattgcctgcaagct

SEQ ID NO: 2456 - DNA, 25 bp, Artificial Sequence
  probe
gcagccacctacaagtatgtgaaca

SEQ ID NO: 2457 - DNA, 25 bp, Artificial Sequence
  probe
catcaccatcgaggctgagccaaga

SEQ ID NO: 2458 - DNA, 25 bp, Artificial Sequence
  probe
gagccaagagctgatggcagccgcc

SEQ ID NO: 2459 - DNA, 25 bp, Artificial Sequence
  probe
cccgctatgacatcgacatgaccaa

SEQ ID NO: 2460 - DNA, 25 bp, Artificial Sequence
  probe
tgaccaagtgcatctactgcggctt

SEQ ID NO: 2461 - DNA, 25 bp, Artificial Sequence
  probe
ccaactttgagttctccacggagac

SEQ ID NO: 2462 - DNA, 25 bp, Artificial Sequence
  probe
tccacggagacccatgaggagctgc

SEQ ID NO: 2463 - DNA, 25 bp, Artificial Sequence
  probe
gttgctcaacaacggggacaagtgg

SEQ ID NO: 2464 - DNA, 25 bp, Artificial Sequence
  probe
gggacaagtgggaggccgagatcgc

SEQ ID NO: 2465 - DNA, 25 bp, Artificial Sequence
  probe
ccaacatccaggctgactacttgta

SEQ ID NO: 2466 - DNA, 25 bp, Artificial Sequence
  probe
ctgactacttgtatcggtgacgccc

SEQ ID NO: 2467 - DNA, 25 bp, Artificial Sequence
  probe
actgcctggtgcgtccatagagaga

SEQ ID NO: 2468 - DNA, 25 bp, Artificial Sequence
  probe
gaactggggggcacccagatggtgc

SEQ ID NO: 2469 - DNA, 25 bp, Artificial Sequence
  probe
tgcagatggtttgcacacctgagcc

SEQ ID NO: 2470 - DNA, 25 bp, Artificial Sequence
  probe
cattccctactctctaaggccaaaa

SEQ ID NO: 2471 - DNA, 25 bp, Artificial Sequence
  probe
caccatcccaaatgcaagcagccag

SEQ ID NO: 2472 - DNA, 25 bp, Artificial Sequence
  probe
ggtgggtacagcttgagaggggggc

SEQ ID NO: 2473 - DNA, 25 bp, Artificial Sequence
  probe
gcttgagaggggggcagctccctca

SEQ ID NO: 2474 - DNA, 25 bp, Artificial Sequence
  probe
actcaacgggtgtagccactggtgc

SEQ ID NO: 2475 - DNA, 25 bp, Artificial Sequence
  probe
gccactggtgctttgaagccttttg

SEQ ID NO: 2476 - DNA, 25 bp, Artificial Sequence
  probe
gaccaggttctcttttcactgggac

SEQ ID NO: 2477 - DNA, 25 bp, Artificial Sequence
  probe
ctcttttcactgggaccttgcaagg

SEQ ID NO: 2478 - DNA, 25 bp, Artificial Sequence
  probe
cacaccggatccctgatgtctaggg

SEQ ID NO: 2479 - DNA, 25 bp, Artificial Sequence
  probe
tctagggaagagtcttctaggtccc

SEQ ID NO: 2480 - DNA, 25 bp, Artificial Sequence
  probe
cctcctgcccttgatcaagagacca

SEQ ID NO: 2481 - DNA, 25 bp, Artificial Sequence
  probe
tcaagagaccagttcactactcaga

SEQ ID NO: 2482 - DNA, 25 bp, Artificial Sequence
  probe
agttcactactcagatgcacgtctc

SEQ ID NO: 2483 - DNA, 25 bp, Artificial Sequence
  probe
tccttggtgccttgaccattcatgt

SEQ ID NO: 2484 - DNA, 25 bp, Artificial Sequence
  probe
tggtgccttgaccattcatgtgacc

SEQ ID NO: 2485 - DNA, 25 bp, Artificial Sequence
  probe
attcatgtgacctttttggcatcac

SEQ ID NO: 2486 - DNA, 25 bp, Artificial Sequence
  probe
agatcaagtgtctgcagatgggccc

SEQ ID NO: 2487 - DNA, 25 bp, Artificial Sequence
  probe
ctgcagatgggcccagggcctgtag

SEQ ID NO: 2488 - DNA, 25 bp, Artificial Sequence
  probe
gcccagggcctgtaggcaaggtgcc

SEQ ID NO: 2489 - DNA, 25 bp, Artificial Sequence
  probe
taagtgctggaacggcgtggccact

SEQ ID NO: 2490 - DNA, 25 bp, Artificial Sequence
  probe
gctctgggtggccaacgatgagaac

SEQ ID NO: 2491 - DNA, 25 bp, Artificial Sequence
  probe
atgagaactgtggcatctgcaggat

SEQ ID NO: 2492 - DNA, 25 bp, Artificial Sequence
  probe
catgcattgcatcctcaagtggctg

SEQ ID NO: 2493 - DNA, 25 bp, Artificial Sequence
  probe
caagtggctgcacgcacagcaggtg

SEQ ID NO: 2494 - DNA, 25 bp, Artificial Sequence
  probe
tctcgctggaggggcatcctgagac

SEQ ID NO: 2495 - DNA, 25 bp, Artificial Sequence
  probe
cgcccctgagctgcaacaaggtgga

SEQ ID NO: 2496 - DNA, 25 bp, Artificial Sequence
  probe
gggctggagctgcgtttgttttgcc

SEQ ID NO: 2497 - DNA, 25 bp, Artificial Sequence
  probe
gttttgccatcactatgttgacact

SEQ ID NO: 2498 - DNA, 25 bp, Artificial Sequence
  probe
cactatgttgacacttttatccaat

SEQ ID NO: 2499 - DNA, 25 bp, Artificial Sequence
  probe
aaactcattaaactactcaaatctt

SEQ ID NO: 2500 - DNA, 25 bp, Artificial Sequence
  probe
gaggtgctgtctatgaacgagtaac

SEQ ID NO: 2501 - DNA, 25 bp, Artificial Sequence
  probe
actgctttggagaaataccacgacg

SEQ ID NO: 2502 - DNA, 25 bp, Artificial Sequence
  probe
accacgacggtattgaaaaggcagc

SEQ ID NO: 2503 - DNA, 25 bp, Artificial Sequence
  probe
ggcagcagaggactcctatgctaag

SEQ ID NO: 2504 - DNA, 25 bp, Artificial Sequence
  probe
agatgttcaaaatgtcaacctgatt

SEQ ID NO: 2505 - DNA, 25 bp, Artificial Sequence
  probe
atgtctttttgtaaatggcttgcca

SEQ ID NO: 2506 - DNA, 25 bp, Artificial Sequence
  probe
tggcttgccatcttttaattttcta

SEQ ID NO: 2507 - DNA, 25 bp, Artificial Sequence
  probe
aataatgttggcttcatcagttttt

SEQ ID NO: 2508 - DNA, 25 bp, Artificial Sequence
  probe
tcatcagtttttatacactctcata

SEQ ID NO: 2509 - DNA, 25 bp, Artificial Sequence
  probe
aataacttgtgcagctattcatgtc

SEQ ID NO: 2510 - DNA, 25 bp, Artificial Sequence
  probe
tactctgccccttgttgtaaatagt

SEQ ID NO: 2511 - DNA, 25 bp, Artificial Sequence
  probe
gggagccctgggttggaatccagcc

SEQ ID NO: 2512 - DNA, 25 bp, Artificial Sequence
  probe
ccacctcttttatgccacaggtttg

SEQ ID NO: 2513 - DNA, 25 bp, Artificial Sequence
  probe
tctcccgctcagggtagggctgtga

SEQ ID NO: 2514 - DNA, 25 bp, Artificial Sequence
  probe
tgaactccctcttacagctaagaac

SEQ ID NO: 2515 - DNA, 25 bp, Artificial Sequence
  probe
attattcctccccattacaggtgat

SEQ ID NO: 2516 - DNA, 25 bp, Artificial Sequence
  probe
gagagcttaagcaacctgctcaggg

SEQ ID NO: 2517 - DNA, 25 bp, Artificial Sequence
  probe
gtcacgtctccaacaggcagtagag

SEQ ID NO: 2518 - DNA, 25 bp, Artificial Sequence
  probe
gtttttgtaccagagtcccagacta

SEQ ID NO: 2519 - DNA, 25 bp, Artificial Sequence
  probe
ccaattgtgctgagtctcctactag

SEQ ID NO: 2520 - DNA, 25 bp, Artificial Sequence
  probe
ctagactcgcttcattctagctttc

SEQ ID NO: 2521 - DNA, 25 bp, Artificial Sequence
  probe
tctagctttctgcttttacctttac

SEQ ID NO: 2522 - DNA, 25 bp, Artificial Sequence
  probe
ctctcttagctcagttactcaattc

SEQ ID NO: 2523 - DNA, 25 bp, Artificial Sequence
  probe
atctgtgtaccaccccatatatttc

SEQ ID NO: 2524 - DNA, 25 bp, Artificial Sequence
  probe
ttcacatgtacagctttctacttct

SEQ ID NO: 2525 - DNA, 25 bp, Artificial Sequence
  probe
gagcaccgggtggcagatgttctat

SEQ ID NO: 2526 - DNA, 25 bp, Artificial Sequence
  probe
gatgttctatgcagtgtggttcaag

SEQ ID NO: 2527 - DNA, 25 bp, Artificial Sequence
  probe
gtggttcaagtttctttgaccgcac

SEQ ID NO: 2528 - DNA, 25 bp, Artificial Sequence
  probe
ttgaccgcacttatatgcattgcta

SEQ ID NO: 2529 - DNA, 25 bp, Artificial Sequence
  probe
aagataccatacacagtctctcatg

SEQ ID NO: 2530 - DNA, 25 bp, Artificial Sequence
  probe
tctctcatggacctatctctattgt

SEQ ID NO: 2531 - DNA, 25 bp, Artificial Sequence
  probe
atgtgacctttttttgctgatttgc

SEQ ID NO: 2532 - DNA, 25 bp, Artificial Sequence
  probe
ttaactagcattattttgccacctt

SEQ ID NO: 2533 - DNA, 25 bp, Artificial Sequence
  probe
gttgctgatgggtacccagtgcggc

SEQ ID NO: 2534 - DNA, 25 bp, Artificial Sequence
  probe
cagtgcggctggaatgtcgtgtatt

SEQ ID NO: 2535 - DNA, 25 bp, Artificial Sequence
  probe
gtcgtgtattgggagtgccaccacc

SEQ ID NO: 2536 - DNA, 25 bp, Artificial Sequence
  probe
gtgccaccacctcagatattttgga

SEQ ID NO: 2537 - DNA, 25 bp, Artificial Sequence
  probe
gaccgagtgagcatgcaccaggaca

SEQ ID NO: 2538 - DNA, 25 bp, Artificial Sequence
  probe
tgcctgctcattcagggagccacaa

SEQ ID NO: 2539 - DNA, 25 bp, Artificial Sequence
  probe
aggctggacgtttacacccagtggc

SEQ ID NO: 2540 - DNA, 25 bp, Artificial Sequence
  probe
gcatcagcagtcacagagcaccaag

SEQ ID NO: 2541 - DNA, 25 bp, Artificial Sequence
  probe
cagcactttcggaccagggactaga

SEQ ID NO: 2542 - DNA, 25 bp, Artificial Sequence
  probe
tcaaagcagcgttccaacctgaggc

SEQ ID NO: 2543 - DNA, 25 bp, Artificial Sequence
  probe
gccattgccttgaccaacatattcc

SEQ ID NO: 2544 - DNA, 25 bp, Artificial Sequence
  probe
aaacactgccattcacaagtcaagg

SEQ ID NO: 2545 - DNA, 25 bp, Artificial Sequence
  probe
ggaacccagggccagctggaagtgt

SEQ ID NO: 2546 - DNA, 25 bp, Artificial Sequence
  probe
gtggagcacacatgctgtggagcac

SEQ ID NO: 2547 - DNA, 25 bp, Artificial Sequence
  probe
gctgtggagcacacatgctgtggag

SEQ ID NO: 2548 - DNA, 25 bp, Artificial Sequence
  probe
gcagtgtgtctgaggtttgtgtagt

SEQ ID NO: 2549 - DNA, 25 bp, Artificial Sequence
  probe
gaaattgcctgtagcatctagtcta

SEQ ID NO: 2550 - DNA, 25 bp, Artificial Sequence
  probe
aaattattagttcacttccctgctg

SEQ ID NO: 2551 - DNA, 25 bp, Artificial Sequence
  probe
tgctgccatgaaactttgccttaag

SEQ ID NO: 2552 - DNA, 25 bp, Artificial Sequence
  probe
gaaggtgctggattccaaggtttgt

SEQ ID NO: 2553 - DNA, 25 bp, Artificial Sequence
  probe
aaggcatctcggtaaagactgcttt

SEQ ID NO: 2554 - DNA, 25 bp, Artificial Sequence
  probe
gactgagttgattctgaccagactt

SEQ ID NO: 2555 - DNA, 25 bp, Artificial Sequence
  probe
tggagcgaccccattacgctaaaga

SEQ ID NO: 2556 - DNA, 25 bp, Artificial Sequence
  probe
gagcgaccccattacgctaaagatg

SEQ ID NO: 2557 - DNA, 25 bp, Artificial Sequence
  probe
gaccccattacgctaaagatgaaag

SEQ ID NO: 2558 - DNA, 25 bp, Artificial Sequence
  probe
gagccaggatctccactgtggagca

SEQ ID NO: 2559 - DNA, 25 bp, Artificial Sequence
  probe
gaatgggaaattgcccaggtggacc

SEQ ID NO: 2560 - DNA, 25 bp, Artificial Sequence
  probe
accccaagaagaccattcagatggg

SEQ ID NO: 2561 - DNA, 25 bp, Artificial Sequence
  probe
gaccattcagatgggatctttccgg

SEQ ID NO: 2562 - DNA, 25 bp, Artificial Sequence
  probe
gatgggatctttccggatcaatcca

SEQ ID NO: 2563 - DNA, 25 bp, Artificial Sequence
  probe
ggatctttccggatcaatccagatg

SEQ ID NO: 2564 - DNA, 25 bp, Artificial Sequence
  probe
tttccggatcaatccagatggcagc

SEQ ID NO: 2565 - DNA, 25 bp, Artificial Sequence
  probe
tccagatggcagccagtcagtggtg

SEQ ID NO: 2566 - DNA, 25 bp, Artificial Sequence
  probe
ctcagtcttcctggcttatgtctta

SEQ ID NO: 2567 - DNA, 25 bp, Artificial Sequence
  probe
ggcttatgtcttagttcattttcag

SEQ ID NO: 2568 - DNA, 25 bp, Artificial Sequence
  probe
ttttcagtctgcttttgtgcttgtt

SEQ ID NO: 2569 - DNA, 25 bp, Artificial Sequence
  probe
gtgcttgtttgatgtagtctctgta

SEQ ID NO: 2570 - DNA, 25 bp, Artificial Sequence
  probe
agtctctgtacaaggtatagtcacc

SEQ ID NO: 2571 - DNA, 25 bp, Artificial Sequence
  probe
gtcaccatgtagttgcatgttcact

SEQ ID NO: 2572 - DNA, 25 bp, Artificial Sequence
  probe
aaggggattgtgctagattcttaat

SEQ ID NO: 2573 - DNA, 25 bp, Artificial Sequence
  probe
aaaatgtagtgccatcaggaggctg

SEQ ID NO: 2574 - DNA, 25 bp, Artificial Sequence
  probe
agatgaggtccagattctaatcagg

SEQ ID NO: 2575 - DNA, 25 bp, Artificial Sequence
  probe
gaaagtgccagaatcagaggcctaa

SEQ ID NO: 2576 - DNA, 25 bp, Artificial Sequence
  probe
gatttagagttctctcagtcttcct

SEQ ID NO: 2577 - DNA, 25 bp, Artificial Sequence
  probe
gggactaaggacagccatgaccccc

SEQ ID NO: 2578 - DNA, 25 bp, Artificial Sequence
  probe
gcaggagggcttgactttctttggc

SEQ ID NO: 2579 - DNA, 25 bp, Artificial Sequence
  probe
ttctttggcacagagctagccccag

SEQ ID NO: 2580 - DNA, 25 bp, Artificial Sequence
  probe
tagccccagtgcggcaacaggagct

SEQ ID NO: 2581 - DNA, 25 bp, Artificial Sequence
  probe
aagaacatacttggcacggctgccc

SEQ ID NO: 2582 - DNA, 25 bp, Artificial Sequence
  probe
gtgaggatggcatcttccgtcatga

SEQ ID NO: 2583 - DNA, 25 bp, Artificial Sequence
  probe
cgcctccgattccgggattttgtgg

SEQ ID NO: 2584 - DNA, 25 bp, Artificial Sequence
  probe
gactttgaggacttcatcttcagcc

SEQ ID NO: 2585 - DNA, 25 bp, Artificial Sequence
  probe
atcttcagccacttctttggagaca

SEQ ID NO: 2586 - DNA, 25 bp, Artificial Sequence
  probe
agcactcacagagcccaagagctgc

SEQ ID NO: 2587 - DNA, 25 bp, Artificial Sequence
  probe
cccacagggaatggccttggccttg

SEQ ID NO: 2588 - DNA, 25 bp, Artificial Sequence
  probe
cagcgttatctaactcctggagggt

SEQ ID NO: 2589 - DNA, 25 bp, Artificial Sequence
  probe
tcctggagggtggactctgtcctgg

SEQ ID NO: 2590 - DNA, 25 bp, Artificial Sequence
  probe
gtttggtgtcctcagatatctttca

SEQ ID NO: 2591 - DNA, 25 bp, Artificial Sequence
  probe
agtagagcaaaatcaccagccctgc

SEQ ID NO: 2592 - DNA, 25 bp, Artificial Sequence
  probe
ccctgcactgatgtcactttatgta

SEQ ID NO: 2593 - DNA, 25 bp, Artificial Sequence
  probe
ggggtctggggaaggcaatctgatt

SEQ ID NO: 2594 - DNA, 25 bp, Artificial Sequence
  probe
gagctttcatcctcttgagtgtatg

SEQ ID NO: 2595 - DNA, 25 bp, Artificial Sequence
  probe
gagtgtatgtccccatagtgggccc

SEQ ID NO: 2596 - DNA, 25 bp, Artificial Sequence
  probe
ccagcacgaggacttaccctggggt

SEQ ID NO: 2597 - DNA, 25 bp, Artificial Sequence
  probe
gttaggtttggaagcagctgtccct

SEQ ID NO: 2598 - DNA, 25 bp, Artificial Sequence
  probe
gcagctgtccctagggggtgaagtc

SEQ ID NO: 2599 - DNA, 25 bp, Artificial Sequence
  probe
gtggtttctaagcacaggggacacc

SEQ ID NO: 2600 - DNA, 25 bp, Artificial Sequence
  probe
acaccccctgcctgaatggatgggt

SEQ ID NO: 2601 - DNA, 25 bp, Artificial Sequence
  probe
atggatgggtccatcccaggcactg

SEQ ID NO: 2602 - DNA, 25 bp, Artificial Sequence
  probe
aaccctaggcccttgagaagctgat

SEQ ID NO: 2603 - DNA, 25 bp, Artificial Sequence
  probe
gaagctgatacttctccttttgctc

SEQ ID NO: 2604 - DNA, 25 bp, Artificial Sequence
  probe
cccacccctgggagatgtagcaaat

SEQ ID NO: 2605 - DNA, 25 bp, Artificial Sequence
  probe
gtgggttttggagtctgagcctcag

SEQ ID NO: 2606 - DNA, 25 bp, Artificial Sequence
  probe
ctgagcctcaggctcaaatccaggc

SEQ ID NO: 2607 - DNA, 25 bp, Artificial Sequence
  probe
ggcaagttaatctctgggaactttg

SEQ ID NO: 2608 - DNA, 25 bp, Artificial Sequence
  probe
tctctgggaactttgggtttcttat

SEQ ID NO: 2609 - DNA, 25 bp, Artificial Sequence
  probe
gtttcttatcctcaaaaaaggcgat

SEQ ID NO: 2610 - DNA, 25 bp, Artificial Sequence
  probe
gggagcgcgatggtgacttctaacc

SEQ ID NO: 2611 - DNA, 25 bp, Artificial Sequence
  probe
ggtgacttctaacctggcagaggcc

SEQ ID NO: 2612 - DNA, 25 bp, Artificial Sequence
  probe
ttggacataggactctgcagggccg

SEQ ID NO: 2613 - DNA, 25 bp, Artificial Sequence
  probe
gcctacaaggtgcctggtttgcagc

SEQ ID NO: 2614 - DNA, 25 bp, Artificial Sequence
  probe
ccgctctttccagcaaagctgctca

SEQ ID NO: 2615 - DNA, 25 bp, Artificial Sequence
  probe
gctgctcagagagggtgtccagcac

SEQ ID NO: 2616 - DNA, 25 bp, Artificial Sequence
  probe
gtgtccagcacagtggagaggccgg

SEQ ID NO: 2617 - DNA, 25 bp, Artificial Sequence
  probe
gaagtgagacgggcagacggcacct

SEQ ID NO: 2618 - DNA, 25 bp, Artificial Sequence
  probe
ggtcacccctttagttctctgggtg

SEQ ID NO: 2619 - DNA, 25 bp, Artificial Sequence
  probe
tctctgggtgtagaccacaccacct

SEQ ID NO: 2620 - DNA, 25 bp, Artificial Sequence
  probe
agcgcctggctccaggaaaacacgc

SEQ ID NO: 2621 - DNA, 25 bp, Artificial Sequence
  probe
cggccccgtagcagcattggaggcc

SEQ ID NO: 2622 - DNA, 25 bp, Artificial Sequence
  probe
gtagcagcattggaggccagagccc

SEQ ID NO: 2623 - DNA, 25 bp, Artificial Sequence
  probe
gcggagggagaacctacccatctcc

SEQ ID NO: 2624 - DNA, 25 bp, Artificial Sequence
  probe
tctggggaggcatgctctgggcctc

SEQ ID NO: 2625 - DNA, 25 bp, Artificial Sequence
  probe
agaagggatgggggcaagaggaagg

SEQ ID NO: 2626 - DNA, 25 bp, Artificial Sequence
  probe
ccctcacagatttggctctcgagtt

SEQ ID NO: 2627 - DNA, 25 bp, Artificial Sequence
  probe
cacagatttggctctcgagttgggg

SEQ ID NO: 2628 - DNA, 25 bp, Artificial Sequence
  probe
gatttggctctcgagttggggagcg

SEQ ID NO: 2629 - DNA, 25 bp, Artificial Sequence
  probe
gttggggagcgaagggctgggggag

SEQ ID NO: 2630 - DNA, 25 bp, Artificial Sequence
  probe
ttctcatacccaggcttggggattt

SEQ ID NO: 2631 - DNA, 25 bp, Artificial Sequence
  probe
atacccaggcttggggatttccagg

SEQ ID NO: 2632 - DNA, 25 bp, Artificial Sequence
  probe
gatctaagagaactctccctgtgcc

SEQ ID NO: 2633 - DNA, 25 bp, Artificial Sequence
  probe
gaaaaacagtcacatgtcacgacaa

SEQ ID NO: 2634 - DNA, 25 bp, Artificial Sequence
  probe
gtcacgacaaaccaatcaatcttta

SEQ ID NO: 2635 - DNA, 25 bp, Artificial Sequence
  probe
tgagatattcctgtatccatacccc

SEQ ID NO: 2636 - DNA, 25 bp, Artificial Sequence
  probe
ggatttcacagagccttgtgtccct

SEQ ID NO: 2637 - DNA, 25 bp, Artificial Sequence
  probe
cacagagccttgtgtccctaaagtt

SEQ ID NO: 2638 - DNA, 25 bp, Artificial Sequence
  probe
cctaaagttctgtcccagtcagcag

SEQ ID NO: 2639 - DNA, 25 bp, Artificial Sequence
  probe
gtcccagtcagcagtctttatagtc

SEQ ID NO: 2640 - DNA, 25 bp, Artificial Sequence
  222394_at 10
gcagtctttatagtccaaacagatt

SEQ ID NO: 2641 - DNA, 25 bp, Artificial Sequence
  probe
cttgaagaatcttgctacagccaaa

SEQ ID NO: 2642 - DNA, 25 bp, Artificial Sequence
  probe
aaaccctgctaggtagtgttataat

SEQ ID NO: 2643 - DNA, 25 bp, Artificial Sequence
  probe
tcatcttgcacctttacaaacaagg

SEQ ID NO: 2644 - DNA, 25 bp, Artificial Sequence
  probe
tgcacctttacaaacaaggaattcc

SEQ ID NO: 2645 - DNA, 25 bp, Artificial Sequence
  probe
atcaaagccatttcaacaacctgca

SEQ ID NO: 2646 - DNA, 25 bp, Artificial Sequence
  probe
aagccatttcaacaacctgcatacc

SEQ ID NO: 2647 - DNA, 25 bp, Artificial Sequence
  probe
ttcaacaacctgcatacccaattat

SEQ ID NO: 2648 - DNA, 25 bp, Artificial Sequence
  probe
cgatatttgtttacctggaaggaga

SEQ ID NO: 2649 - DNA, 25 bp, Artificial Sequence
  probe
gatatcaaggctcagtttattggtc

SEQ ID NO: 2650 - DNA, 25 bp, Artificial Sequence
  probe
aaggctcagtttattggtcctctgg

SEQ ID NO: 2651 - DNA, 25 bp, Artificial Sequence
  probe
ctcagtttattggtcctctggtgtt

SEQ ID NO: 2652 - DNA, 25 bp, Artificial Sequence
  probe
aaactgtctgaatctggagcaatta

SEQ ID NO: 2653 - DNA, 25 bp, Artificial Sequence
  probe
ctgtctgaatctggagcaattatga

SEQ ID NO: 2654 - DNA, 25 bp, Artificial Sequence
  probe
aaggtggggtaattgcattcgtctg

SEQ ID NO: 2655 - DNA, 25 bp, Artificial Sequence
  probe
tctgcagtagacacgagttcctcgg

SEQ ID NO: 2656 - DNA, 25 bp, Artificial Sequence
  probe
tcctcggacctgtataatctcccaa

SEQ ID NO: 2657 - DNA, 25 bp, Artificial Sequence
  probe
gggctggaccccaatggagaacagg

SEQ ID NO: 2658 - DNA, 25 bp, Artificial Sequence
  probe
tccagcacgagatggaccacctgca

SEQ ID NO: 2659 - DNA, 25 bp, Artificial Sequence
  probe
atggacagcaggacgttcacaaacg

SEQ ID NO: 2660 - DNA, 25 bp, Artificial Sequence
  probe
gctttgctactggggctgaggattc

SEQ ID NO: 2661 - DNA, 25 bp, Artificial Sequence
  probe
gaggattccggataccaagacgcaa

SEQ ID NO: 2662 - DNA, 25 bp, Artificial Sequence
  probe
aaacactttcactttgagctgggca

SEQ ID NO: 2663 - DNA, 25 bp, Artificial Sequence
  probe
gagctgggcaaatcttacttggcat

SEQ ID NO: 2664 - DNA, 25 bp, Artificial Sequence
  probe
tcaacttggatggctcgcatatgac

SEQ ID NO: 2665 - DNA, 25 bp, Artificial Sequence
  probe
gtcaaaccatgactcgcacatggca

SEQ ID NO: 2666 - DNA, 25 bp, Artificial Sequence
  probe
aaagaacgggcccacagtacagcct

SEQ ID NO: 2667 - DNA, 25 bp, Artificial Sequence
  probe
atttgatagctgtttctgggtattt

SEQ ID NO: 2668 - DNA, 25 bp, Artificial Sequence
  probe
gtgacctgtttactgtctctttaga

SEQ ID NO: 2669 - DNA, 25 bp, Artificial Sequence
  probe
tcaccatgtgtgactgtcttctgtt

SEQ ID NO: 2670 - DNA, 25 bp, Artificial Sequence
  probe
ttatcatttgtcttacaggcggcta

SEQ ID NO: 2671 - DNA, 25 bp, Artificial Sequence
  probe
tacaggcggctattgcagacggcta

SEQ ID NO: 2672 - DNA, 25 bp, Artificial Sequence
  probe
gatttttttcatgtgatcttttcca

SEQ ID NO: 2673 - DNA, 25 bp, Artificial Sequence
  probe
ttccaagcttcaacttaacttaact

SEQ ID NO: 2674 - DNA, 25 bp, Artificial Sequence
  probe
gtatgatgatgtctcttacttctac

SEQ ID NO: 2675 - DNA, 25 bp, Artificial Sequence
  probe
ttacttctacaggttccttgagcac

SEQ ID NO: 2676 - DNA, 25 bp, Artificial Sequence
  probe
tattctgtcctgagaccacgggcaa

SEQ ID NO: 2677 - DNA, 25 bp, Artificial Sequence
  probe
tgtcctgagaccacgggcaaagctc

SEQ ID NO: 2678 - DNA, 25 bp, Artificial Sequence
  probe
ttattattttgatagcagatgtgct

SEQ ID NO: 2679 - DNA, 25 bp, Artificial Sequence
  probe
gagcctcctatgtgtgacttatgac

SEQ ID NO: 2680 - DNA, 25 bp, Artificial Sequence
  probe
tctctgtgttctgtgtatttgtctg

SEQ ID NO: 2681 - DNA, 25 bp, Artificial Sequence
  probe
gtgttctgtgtatttgtctgaatta

SEQ ID NO: 2682 - DNA, 25 bp, Artificial Sequence
  probe
ttgtctgaattaatgacctgggata

SEQ ID NO: 2683 - DNA, 25 bp, Artificial Sequence
  probe
gacctgggatataaagctatgctag

SEQ ID NO: 2684 - DNA, 25 bp, Artificial Sequence
  probe
gctatgctagctttcaaacaggaga

SEQ ID NO: 2685 - DNA, 25 bp, Artificial Sequence
  probe
gtatattttgcagttgccagaccaa

SEQ ID NO: 2686 - DNA, 25 bp, Artificial Sequence
  probe
gcagttgccagaccaataaaatacc

SEQ ID NO: 2687 - DNA, 25 bp, Artificial Sequence
  probe
gatggagatcctacaaacacgtcag

SEQ ID NO: 2688 - DNA, 25 bp, Artificial Sequence
  probe
aacacgtcagtgggcagatgctgta

SEQ ID NO: 2689 - DNA, 25 bp, Artificial Sequence
  probe
attctattcattatgccttaccatg

SEQ ID NO: 2690 - DNA, 25 bp, Artificial Sequence
  probe
tgccttaccatgtggcagatcccac

SEQ ID NO: 2691 - DNA, 25 bp, Artificial Sequence
  probe
ggcagatcccacaggagtttgtcaa

SEQ ID NO: 2692 - DNA, 25 bp, Artificial Sequence
  probe
aggagttgtgtcgagctcacagcgt

SEQ ID NO: 2693 - DNA, 25 bp, Artificial Sequence
  probe
gctcacagcgtttctatcaacttac

SEQ ID NO: 2694 - DNA, 25 bp, Artificial Sequence
  probe
acaacttcatctgtactgcttgaat

SEQ ID NO: 2695 - DNA, 25 bp, Artificial Sequence
  probe
ccagtcccgggcactgagtgttgaa

SEQ ID NO: 2696 - DNA, 25 bp, Artificial Sequence
  probe
atgatgtctgaagttattgctgcac

SEQ ID NO: 2697 - DNA, 25 bp, Artificial Sequence
  probe
attgctgcacaattacccaagatat

SEQ ID NO: 2698 - DNA, 25 bp, Artificial Sequence
  probe
cagggaatctttctcatgactcacg

SEQ ID NO: 2699 - DNA, 25 bp, Artificial Sequence
  probe
atgactcacgccctatttagttatt

SEQ ID NO: 2700 - DNA, 25 bp, Artificial Sequence
  probe
attaatgctactaccctattttgag

SEQ ID NO: 2701 - DNA, 25 bp, Artificial Sequence
  probe
taggtccctaagtacattgtccaga

SEQ ID NO: 2702 - DNA, 25 bp, Artificial Sequence
  probe
tttagccccatatacttcttgaatc

SEQ ID NO: 2703 - DNA, 25 bp, Artificial Sequence
  probe
atctaaagtcatacaccttgctcct

SEQ ID NO: 2704 - DNA, 25 bp, Artificial Sequence
  probe
ccttgctcctcatttctgagtggga

SEQ ID NO: 2705 - DNA, 25 bp, Artificial Sequence
  probe
aattgttctgaaggtttttgccaag

SEQ ID NO: 2706 - DNA, 25 bp, Artificial Sequence
  probe
gtgatggggtgacaatgcaaagctg

SEQ ID NO: 2707 - DNA, 25 bp, Artificial Sequence
  probe
agtgggcacctaatatcatcatcat

SEQ ID NO: 2708 - DNA, 25 bp, Artificial Sequence
  probe
cagtctactcagcttgacaagtgtt

SEQ ID NO: 2709 - DNA, 25 bp, Artificial Sequence
  probe
gcaggggatggcctgatcgagctgc

SEQ ID NO: 2710 - DNA, 25 bp, Artificial Sequence
  probe
caggggatggcctgatcgagctgcg

SEQ ID NO: 2711 - DNA, 25 bp, Artificial Sequence
  probe
cagccccgatgattcttaacacagc

SEQ ID NO: 2712 - DNA, 25 bp, Artificial Sequence
  probe
gcaggtgagcgacgaccttacagag

SEQ ID NO: 2713 - DNA, 25 bp, Artificial Sequence
  probe
tgagcgacgaccttacagagcgagc

SEQ ID NO: 2714 - DNA, 25 bp, Artificial Sequence
  probe
tcctggatgacgtgtccttgacaca

SEQ ID NO: 2715 - DNA, 25 bp, Artificial Sequence
  probe
tggatgacgtgtccttgacacatct

SEQ ID NO: 2716 - DNA, 25 bp, Artificial Sequence
  probe
gaccttcgggaaggagttcacagaa

SEQ ID NO: 2717 - DNA, 25 bp, Artificial Sequence
  probe
tcgggaaggagttcacagaagcggt

SEQ ID NO: 2718 - DNA, 25 bp, Artificial Sequence
  probe
gagttcacagaagcggtggaagcca

SEQ ID NO: 2719 - DNA, 25 bp, Artificial Sequence
  probe
gagcaacagaaaaaggcggccatca

SEQ ID NO: 2720 - DNA, 25 bp, Artificial Sequence
  probe
gtcactgatggaaggtttgcggatg

SEQ ID NO: 2721 - DNA, 25 bp, Artificial Sequence
  probe
ggatgagggcatgtgcggctgaact

SEQ ID NO: 2722 - DNA, 25 bp, Artificial Sequence
  probe
ccagcggttcctgtgcagatgctgc

SEQ ID NO: 2723 - DNA, 25 bp, Artificial Sequence
  probe
gatgctgctgaagagaggtgccggg

SEQ ID NO: 2724 - DNA, 25 bp, Artificial Sequence
  probe
gtctgtctgttaccataagtctgat

SEQ ID NO: 2725 - DNA, 25 bp, Artificial Sequence
  probe
gaatctgcccctgttgaggtgggtg

SEQ ID NO: 2726 - DNA, 25 bp, Artificial Sequence
  probe
agaggaggcctggaccgagatgtga

SEQ ID NO: 2727 - DNA, 25 bp, Artificial Sequence
  probe
ccctctcagatacccagtggaattc

SEQ ID NO: 2728 - DNA, 25 bp, Artificial Sequence
  probe
tgaaggattgcatcctgctggggct

SEQ ID NO: 2729 - DNA, 25 bp, Artificial Sequence
  probe
tgctggggctgaacatgcctgccaa

SEQ ID NO: 2730 - DNA, 25 bp, Artificial Sequence
  probe
gaacatgcctgccaaagacgtgtcc

SEQ ID NO: 2731 - DNA, 25 bp, Artificial Sequence
  probe
agccatttgaagacgcctcgtttgc

SEQ ID NO: 2732 - DNA, 25 bp, Artificial Sequence
  probe
atttgaagacgcctcgtttgcgctg

SEQ ID NO: 2733 - DNA, 25 bp, Artificial Sequence
  probe
tattgttcccacaatggctgggagg

SEQ ID NO: 2734 - DNA, 25 bp, Artificial Sequence
  probe
ccgccagattctcccttaaggaatt

SEQ ID NO: 2735 - DNA, 25 bp, Artificial Sequence
  probe
gattctcccttaaggaattgacttc

SEQ ID NO: 2736 - DNA, 25 bp, Artificial Sequence
  probe
aaggaattgacttcagcaggggtgg

SEQ ID NO: 2737 - DNA, 25 bp, Artificial Sequence
  probe
ggtgctggaggcagactcgagggcc

SEQ ID NO: 2738 - DNA, 25 bp, Artificial Sequence
  probe
ggaggcagactcgagggccgaattg

SEQ ID NO: 2739 - DNA, 25 bp, Artificial Sequence
  probe
cagactcgagggccgaattgtttct

SEQ ID NO: 2740 - DNA, 25 bp, Artificial Sequence
  probe
tcagtcgcaaaggtgaacactcatg

SEQ ID NO: 2741 - DNA, 25 bp, Artificial Sequence
  probe
aaaggtgaacactcatgcggcagcc

SEQ ID NO: 2742 - DNA, 25 bp, Artificial Sequence
  probe
gggggccaacaaagctcaggacaac

SEQ ID NO: 2743 - DNA, 25 bp, Artificial Sequence
  probe
gacattcccaagtcagtacgtccaa

SEQ ID NO: 2744 - DNA, 25 bp, Artificial Sequence
  probe
aaaacttacctcattagcagcatcc

SEQ ID NO: 2745 - DNA, 25 bp, Artificial Sequence
  probe
cagcatccctctacaaggtgcattt

SEQ ID NO: 2746 - DNA, 25 bp, Artificial Sequence
  probe
ataagtatactgcctgcctatgtga

SEQ ID NO: 2747 - DNA, 25 bp, Artificial Sequence
  probe
gacgacaatccaaaaaccttctact

SEQ ID NO: 2748 - DNA, 25 bp, Artificial Sequence
  probe
attgcagccgtcgttgatgttattc

SEQ ID NO: 2749 - DNA, 25 bp, Artificial Sequence
  probe
attcgggaattaggcatctgccctg

SEQ ID NO: 2750 - DNA, 25 bp, Artificial Sequence
  probe
gccctgatgatgctgctgtaatccc

SEQ ID NO: 2751 - DNA, 25 bp, Artificial Sequence
  probe
taatggaagccctgtctgtttgcca

SEQ ID NO: 2752 - DNA, 25 bp, Artificial Sequence
  probe
gtttgccacacccaggtgatttcct

SEQ ID NO: 2753 - DNA, 25 bp, Artificial Sequence
  Probe
gccttctgggaacctatggagaaag

SEQ ID NO: 2754 - DNA, 25 bp, Artificial Sequence
  Probe
agggaatccaaggaagcagccaagg

SEQ ID NO: 2755 - DNA, 25 bp, Artificial Sequence
  Probe
gggtctcactagtaccaagtgggtc

SEQ ID NO: 2756 - DNA, 25 bp, Artificial Sequence
  Probe
gcacccagcttagtgctgggactag

SEQ ID NO: 2757 - DNA, 25 bp, Artificial Sequence
  Probe
gggactagcccagaaacttgaatgg

SEQ ID NO: 2758 - DNA, 25 bp, Artificial Sequence
  Probe
ggcagtaggctctaagtgggtgact

SEQ ID NO: 2759 - DNA, 25 bp, Artificial Sequence
  Probe
tgggtgactggccacaggccgagaa

SEQ ID NO: 2760 - DNA, 25 bp, Artificial Sequence
  Probe
gaaaagggtacagcctctaggtggg

SEQ ID NO: 2761 - DNA, 25 bp, Artificial Sequence
  Probe
ctgttgcatacatgcctggcatctg

SEQ ID NO: 2762 - DNA, 25 bp, Artificial Sequence
  Probe
cccacatggggctctgagcaggctg

SEQ ID NO: 2763 - DNA, 25 bp, Artificial Sequence
  Probe
gagcaggctgtatctggattctggc

SEQ ID NO: 2764 - DNA, 25 bp, Artificial Sequence
  Probe
tatgctgaacatttagggccagtat

SEQ ID NO: 2765 - DNA, 25 bp, Artificial Sequence
  Probe
gggccagtatgtgtaactgacatgc

SEQ ID NO: 2766 - DNA, 25 bp, Artificial Sequence
  Probe
ggacagttgtactcacttttgctgg

SEQ ID NO: 2767 - DNA, 25 bp, Artificial Sequence
  Probe
gtctcagtcctggagctatctacag

SEQ ID NO: 2768 - DNA, 25 bp, Artificial Sequence
  Probe
ggagctatctacagtatgttaccag

SEQ ID NO: 2769 - DNA, 25 bp, Artificial Sequence
  Probe
atctacagtatgttaccagcgagta

SEQ ID NO: 2770 - DNA, 25 bp, Artificial Sequence
  Probe
gaataatagcttctacttgcttttc

SEQ ID NO: 2771 - DNA, 25 bp, Artificial Sequence
  Probe
tacttgcttttccctacagagttca

SEQ ID NO: 2772 - DNA, 25 bp, Artificial Sequence
  Probe
gcttttccctacagagttcaggagt

SEQ ID NO: 2773 - DNA, 25 bp, Artificial Sequence
  Probe
taaaacgtcatcttagtctcattat

SEQ ID NO: 2774 - DNA, 25 bp, Artificial Sequence
  Probe
tcatcttagtctcattatgaccttc

SEQ ID NO: 2775 - DNA, 25 bp, Artificial Sequence
  Probe
gaagaatgttctagtctcccaagca

SEQ ID NO: 2776 - DNA, 25 bp, Artificial Sequence
  Probe
tagtctcccaagcaagtcttttaat

SEQ ID NO: 2777 - DNA, 25 bp, Artificial Sequence
  Probe
cagaattcttcttctactgtttcat

SEQ ID NO: 2778 - DNA, 25 bp, Artificial Sequence
  Probe
atttagacaagaataccgccagcct

SEQ ID NO: 2779 - DNA, 25 bp, Artificial Sequence
  Probe
accgccagccttacttatgtgaagt

SEQ ID NO: 2780 - DNA, 25 bp, Artificial Sequence
  Probe
aacaggccaagctctagtttgtcct

SEQ ID NO: 2781 - DNA, 25 bp, Artificial Sequence
  Probe
tagtttgtcctgtttgtaacgtaga

SEQ ID NO: 2782 - DNA, 25 bp, Artificial Sequence
  Probe
aaagacttcagatctaaccctgttc

SEQ ID NO: 2783 - DNA, 25 bp, Artificial Sequence
  Probe
ctaaccctgttcaatgtgcatgtgg

SEQ ID NO: 2784 - DNA, 25 bp, Artificial Sequence
  Probe
aagctccagaagtactggtagctca

SEQ ID NO: 2785 - DNA, 25 bp, Artificial Sequence
  Probe
aaacaatcccaaacatacccttgat

SEQ ID NO: 2786 - DNA, 25 bp, Artificial Sequence
  Probe
gaataagcacttgaatcagttttta

SEQ ID NO: 2787 - DNA, 25 bp, Artificial Sequence
  Probe
gtcaattatgttggtactttccaca

SEQ ID NO: 2788 - DNA, 25 bp, Artificial Sequence
  Probe
gaaggataaattgtaccatcatttt

SEQ ID NO: 2789 - DNA, 25 bp, Artificial Sequence
  Probe
atcattttattataatcctcaagag

SEQ ID NO: 2790 - DNA, 25 bp, Artificial Sequence
  Probe
gtatcttagttacatttctatcagt

SEQ ID NO: 2791 - DNA, 25 bp, Artificial Sequence
  Probe
tacatttctatcagtacttttatta

SEQ ID NO: 2792 - DNA, 25 bp, Artificial Sequence
  Probe
gtagttagcttaagtagtttctcca

SEQ ID NO: 2793 - DNA, 25 bp, Artificial Sequence
  Probe
gtagtttctccaagtacttttgtgc

SEQ ID NO: 2794 - DNA, 25 bp, Artificial Sequence
  Probe
ttctccaagtacttttgtgctatca

SEQ ID NO: 2795 - DNA, 25 bp, Artificial Sequence
  Probe
tttgtgctatcaatgagttcttctc

SEQ ID NO: 2796 - DNA, 25 bp, Artificial Sequence
  Probe
aataattagttaggccaggcacaat

SEQ ID NO: 2797 - DNA, 25 bp, Artificial Sequence
  Probe
taaagaacgaacctagtgggacatt

SEQ ID NO: 2798 - DNA, 25 bp, Artificial Sequence
  Probe
gggacatttttagactttgatgctc

SEQ ID NO: 2799 - DNA, 25 bp, Artificial Sequence
  Probe
gatgctctagccattttggattgtg

SEQ ID NO: 2800 - DNA, 25 bp, Artificial Sequence
  Probe
ggattgtgtaagttgcagatgtggc

SEQ ID NO: 2801 - DNA, 25 bp, Artificial Sequence
  Probe
tgcagatgtggcttttactttttaa

SEQ ID NO: 2802 - DNA, 25 bp, Artificial Sequence
  Probe
aaagtgtgtcagaccatggcgtggt

SEQ ID NO: 2803 - DNA, 25 bp, Artificial Sequence
  Probe
atggcgtggtatttattgtgcagca

SEQ ID NO: 2804 - DNA, 25 bp, Artificial Sequence
  Probe
cagaggcagcctgtcttttcagttg

SEQ ID NO: 2805 - DNA, 25 bp, Artificial Sequence
  Probe
tgtttttctattaatcttttgtcaa

SEQ ID NO: 2806 - DNA, 25 bp, Artificial Sequence
  Probe
atcttttgtcaacttcctgattatg

SEQ ID NO: 2807 - DNA, 25 bp, Artificial Sequence
  Probe
gtatgtacagtctacttttgaacta

SEQ ID NO: 2808 - DNA, 25 bp, Artificial Sequence
  Probe
tcgagtgattcgctggatcctgtca

SEQ ID NO: 2809 - DNA, 25 bp, Artificial Sequence
  Probe
ggatcctgtcaattggccttaaaga

SEQ ID NO: 2810 - DNA, 25 bp, Artificial Sequence
  Probe
gagcacttctggccttagatgaaac

SEQ ID NO: 2811 - DNA, 25 bp, Artificial Sequence
  Probe
ggccttagatgaaaccttcgacttc

SEQ ID NO: 2812 - DNA, 25 bp, Artificial Sequence
  Probe
gcactggcactgctgttacagatcc

SEQ ID NO: 2813 - DNA, 25 bp, Artificial Sequence
  Probe
ttacagatcccgacgcagaacacac

SEQ ID NO: 2814 - DNA, 25 bp, Artificial Sequence
  Probe
agaacacacaggctcgtgctgtctt

SEQ ID NO: 2815 - DNA, 25 bp, Artificial Sequence
  Probe
caaccttttggtcatggggactgat

SEQ ID NO: 2816 - DNA, 25 bp, Artificial Sequence
  Probe
gctttaggagagcaccttcatggag

SEQ ID NO: 2817 - DNA, 25 bp, Artificial Sequence
  Probe
aaaggacattcgtggcttagctgct

SEQ ID NO: 2818 - DNA, 25 bp, Artificial Sequence
  Probe
tccctgcaaacttccgggtgacttc

SEQ ID NO: 2819 - DNA, 25 bp, Artificial Sequence
  Probe
tgcagatggacggtatgtgatgggt

SEQ ID NO: 2820 - DNA, 25 bp, Artificial Sequence
  Probe
tgatgggtcacactaacctgtcact

SEQ ID NO: 2821 - DNA, 25 bp, Artificial Sequence
  Probe
gtcacactaacctgtcacttgttgg

SEQ ID NO: 2822 - DNA, 25 bp, Artificial Sequence
  Probe
ctaacctgtcacttgttgggagcat

SEQ ID NO: 2823 - DNA, 25 bp, Artificial Sequence
  Probe
tgtcacttgttgggagcatgagcag

SEQ ID NO: 2824 - DNA, 25 bp, Artificial Sequence
  Probe
gcagctttctgtctggaacattaat

SEQ ID NO: 2825 - DNA, 25 bp, Artificial Sequence
  Probe
aataatgatctaaaacggcctattt

SEQ ID NO: 2826 - DNA, 25 bp, Artificial Sequence
  Probe
aacggcctatttaatatgttacaag

SEQ ID NO: 2827 - DNA, 25 bp, Artificial Sequence
  Probe
tttaatatgttacaaggcacttgag

SEQ ID NO: 2828 - DNA, 25 bp, Artificial Sequence
  Probe
ggcacttgagtatggttgcatgtcc

SEQ ID NO: 2829 - DNA, 25 bp, Artificial Sequence
  Probe
tgagtatggttgcatgtccaaatat

SEQ ID NO: 2830 - DNA, 25 bp, Artificial Sequence
  Probe
gttgtgcctaccactggctggcaca

SEQ ID NO: 2831 - DNA, 25 bp, Artificial Sequence
  Probe
actggctggcacaccagggcaatga

SEQ ID NO: 2832 - DNA, 25 bp, Artificial Sequence
  Probe
gggcaatgatttccctgcagaagga

SEQ ID NO: 2833 - DNA, 25 bp, Artificial Sequence
  Probe
gaaagaatgtttcacccttgcatcc

SEQ ID NO: 2834 - DNA, 25 bp, Artificial Sequence
  Probe
agctacagcctgtgctcagttgagt

SEQ ID NO: 2835 - DNA, 25 bp, Artificial Sequence
  Probe
gttcacactcagactttggctttat

SEQ ID NO: 2836 - DNA, 25 bp, Artificial Sequence
  Probe
aagaaccaccctgaggtttccatgc

SEQ ID NO: 2837 - DNA, 25 bp, Artificial Sequence
  Probe
atgcctctcccattttagtggtagc

SEQ ID NO: 2838 - DNA, 25 bp, Artificial Sequence
  Probe
ggtagcattttgtgtctttactcca

SEQ ID NO: 2839 - DNA, 25 bp, Artificial Sequence
  Probe
tagttccaccaaggttcacacacca

SEQ ID NO: 2840 - DNA, 25 bp, Artificial Sequence
  Probe
tttgagtggcctttcaaccctaaga

SEQ ID NO: 2841 - DNA, 25 bp, Artificial Sequence
  Probe
ttctcacttctgtcatctagcatgg

SEQ ID NO: 2842 - DNA, 25 bp, Artificial Sequence
  Probe
gggacccatgaacattcctttggta

SEQ ID NO: 2843 - DNA, 25 bp, Artificial Sequence
  Probe
tttggtatcagacccgaagcgcacc

SEQ ID NO: 2844 - DNA, 25 bp, Artificial Sequence
  Probe
gaagcgcaccattgctcaggattat

SEQ ID NO: 2845 - DNA, 25 bp, Artificial Sequence
  Probe
gaaggcatctcgttcaggggccttt

SEQ ID NO: 2846 - DNA, 25 bp, Artificial Sequence
  Probe
aagggtattcttcggcagatcactg

SEQ ID NO: 2847 - DNA, 25 bp, Artificial Sequence
  Probe
gttgccgctctgtggatgagacttt

SEQ ID NO: 2848 - DNA, 25 bp, Artificial Sequence
  Probe
ctttgagactagttcaggccttcca

SEQ ID NO: 2849 - DNA, 25 bp, Artificial Sequence
  Probe
aggccttccagttcactgacaaaca

SEQ ID NO: 2850 - DNA, 25 bp, Artificial Sequence
  Probe
gtgagcgctgggctgttttagtgcc

SEQ ID NO: 2851 - DNA, 25 bp, Artificial Sequence
  Probe
tttagtgccaggctgcggtgggcag

SEQ ID NO: 2852 - DNA, 25 bp, Artificial Sequence
  Probe
tgcatctgttacttagggtcaaggc

SEQ ID NO: 2853 - DNA, 25 bp, Artificial Sequence
  Probe
tagggtcaaggcttgggtcttgccc

SEQ ID NO: 2854 - DNA, 25 bp, Artificial Sequence
  Probe
ccccagcgcagctatgaacctggag

SEQ ID NO: 2855 - DNA, 25 bp, Artificial Sequence
  Probe
gaacctggagcgagtgtccaatgag

SEQ ID NO: 2856 - DNA, 25 bp, Artificial Sequence
  Probe
aacctgtgccggaagtactacctgg

SEQ ID NO: 2857 - DNA, 25 bp, Artificial Sequence
  Probe
ccttttctctggttggtcaacatct

SEQ ID NO: 2858 - DNA, 25 bp, Artificial Sequence
  Probe
ttggtcaacatcttctggttcttcc

SEQ ID NO: 2859 - DNA, 25 bp, Artificial Sequence
  Probe
cagcctacacagaacagagccaaat

SEQ ID NO: 2860 - DNA, 25 bp, Artificial Sequence
  Probe
atcaaaggctatgtctggcgctcag

SEQ ID NO: 2861 - DNA, 25 bp, Artificial Sequence
  Probe
tctgggtgatagtgctcacctcctg

SEQ ID NO: 2862 - DNA, 25 bp, Artificial Sequence
  Probe
gccggaggaagtgagctctcctggg

SEQ ID NO: 2863 - DNA, 25 bp, Artificial Sequence
  Probe
gattgctgagggttttgctttggat

SEQ ID NO: 2864 - DNA, 25 bp, Artificial Sequence
  Probe
tgctttggatttttcatacctataa

SEQ ID NO: 2865 - DNA, 25 bp, Artificial Sequence
  Probe
gttcttctctctaaacagcaaagcc

SEQ ID NO: 2866 - DNA, 25 bp, Artificial Sequence
  Probe
agcaaagccaaagcactctgcacac

SEQ ID NO: 2867 - DNA, 25 bp, Artificial Sequence
  Probe
gagcatatttcttttaggccgtggt

SEQ ID NO: 2868 - DNA, 25 bp, Artificial Sequence
  Probe
gtgaagttgataaaccacccctgct

SEQ ID NO: 2869 - DNA, 25 bp, Artificial Sequence
  Probe
tctagtccccagattgatcatctcc

SEQ ID NO: 2870 - DNA, 25 bp, Artificial Sequence
  Probe
ggcaacgtgactctgttttttgtgt

SEQ ID NO: 2871 - DNA, 25 bp, Artificial Sequence
  Probe
tgtgtgtgtttccatgctgactagt

SEQ ID NO: 2872 - DNA, 25 bp, Artificial Sequence
  Probe
gactagtcccctactgttaatatca

SEQ ID NO: 2873 - DNA, 25 bp, Artificial Sequence
  Probe
ttaggctataaccaggtctttcctg

SEQ ID NO: 2874 - DNA, 25 bp, Artificial Sequence
  Probe
gggcctggactgtgacattgacatc

SEQ ID NO: 2875 - DNA, 25 bp, Artificial Sequence
  Probe
gacggaggcgcagtacaagttcatc

SEQ ID NO: 2876 - DNA, 25 bp, Artificial Sequence
  Probe
ccatcgcccagttcattgaaaccac

SEQ ID NO: 2877 - DNA, 25 bp, Artificial Sequence
  Probe
gcagtcgcagaagggccaggagtcg

SEQ ID NO: 2878 - DNA, 25 bp, Artificial Sequence
  Probe
gccaggagtcggagtacgggaacat

SEQ ID NO: 2879 - DNA, 25 bp, Artificial Sequence
  Probe
cctatcccccagccatgaagaatgc

SEQ ID NO: 2880 - DNA, 25 bp, Artificial Sequence
  Probe
gaagcagcggtcagcagacaaggag

SEQ ID NO: 2881 - DNA, 25 bp, Artificial Sequence
  Probe
gaggaagtgagcggtgctgtcctca

SEQ ID NO: 2882 - DNA, 25 bp, Artificial Sequence
  Probe
accctgtggaagcatttcgcgatgg

SEQ ID NO: 2883 - DNA, 25 bp, Artificial Sequence
  Probe
ttcgcgatggacagactcacaacct

SEQ ID NO: 2884 - DNA, 25 bp, Artificial Sequence
  Probe
cacaacctgaacctaggagtgcccc

SEQ ID NO: 2885 - DNA, 25 bp, Artificial Sequence
  Probe
tggaatggaactcctcactagctgc

SEQ ID NO: 2886 - DNA, 25 bp, Artificial Sequence
  Probe
ctgctcccttccggacaatgaagaa

SEQ ID NO: 2887 - DNA, 25 bp, Artificial Sequence
  Probe
ctcctgggtggggtttggcttcagg

SEQ ID NO: 2888 - DNA, 25 bp, Artificial Sequence
  Probe
tggtctcccaggtgaggcaagccat

SEQ ID NO: 2889 - DNA, 25 bp, Artificial Sequence
  Probe
tagggtgagtggcttgcttggtggg

SEQ ID NO: 2890 - DNA, 25 bp, Artificial Sequence
  Probe
gtgggacctgacgagttggtggcat

SEQ ID NO: 2891 - DNA, 25 bp, Artificial Sequence
  Probe
gggaaggatgtgggtctctagtgcc

SEQ ID NO: 2892 - DNA, 25 bp, Artificial Sequence
  Probe
cttgccctggcttagctgcaggaga

SEQ ID NO: 2893 - DNA, 25 bp, Artificial Sequence
  Probe
gagaagatggctgctttcacttccc

SEQ ID NO: 2894 - DNA, 25 bp, Artificial Sequence
  Probe
tttggtctccaagatgaatgctcat

SEQ ID NO: 2895 - DNA, 25 bp, Artificial Sequence
  Probe
ggagggtgccaggtagaagctaggg

SEQ ID NO: 2896 - DNA, 25 bp, Artificial Sequence
  Probe
caggctaatagcgtggttgggggtg

SEQ ID NO: 2897 - DNA, 25 bp, Artificial Sequence
  Probe
tgtccttgttacattgaggttaaga

SEQ ID NO: 2898 - DNA, 25 bp, Artificial Sequence
  Probe
gtgcaatctctttccaggatttcgt

SEQ ID NO: 2899 - DNA, 25 bp, Artificial Sequence
  Probe
ggatttcgtttgctgtggcattggt

SEQ ID NO: 2900 - DNA, 25 bp, Artificial Sequence
  Probe
ggcattggttatatcagagcacttt

SEQ ID NO: 2901 - DNA, 25 bp, Artificial Sequence
  Probe
gcttttaattatctacagctatttt

SEQ ID NO: 2902 - DNA, 25 bp, Artificial Sequence
  Probe
ttctctcctacagtactgggaccac

SEQ ID NO: 2903 - DNA, 25 bp, Artificial Sequence
  Probe
ctgggaccactgtaaacttctcaga

SEQ ID NO: 2904 - DNA, 25 bp, Artificial Sequence
  Probe
aaacttctcagatgacttgtatttt

SEQ ID NO: 2905 - DNA, 25 bp, Artificial Sequence
  Probe
ttgttgttactcacttaagactgga

SEQ ID NO: 2906 - DNA, 25 bp, Artificial Sequence
  Probe
ttttttccctggctatgatagaatc

SEQ ID NO: 2907 - DNA, 25 bp, Artificial Sequence
  Probe
gaaggagtaagtctgccctttgcca

SEQ ID NO: 2908 - DNA, 25 bp, Artificial Sequence
  Probe
tgtggaccccgattggtgagggctc

SEQ ID NO: 2909 - DNA, 25 bp, Artificial Sequence
  Probe
gtgagggctctgcatatgcctgtat

SEQ ID NO: 2910 - DNA, 25 bp, Artificial Sequence
  Probe
gtgtgtgcacatgccggtatgaaga

SEQ ID NO: 2911 - DNA, 25 bp, Artificial Sequence
  Probe
caggcatgtgcttctcagttttgct

SEQ ID NO: 2912 - DNA, 25 bp, Artificial Sequence
  Probe
gtccatgatgctcagccacatactg

SEQ ID NO: 2913 - DNA, 25 bp, Artificial Sequence
  Probe
aatgttaaatgacgcaccatcctcc

SEQ ID NO: 2914 - DNA, 25 bp, Artificial Sequence
  Probe
gaactactaattatctctcaaggct

SEQ ID NO: 2915 - DNA, 25 bp, Artificial Sequence
  Probe
gtatccaccaaacttaactccgtat

SEQ ID NO: 2916 - DNA, 25 bp, Artificial Sequence
  Probe
taactccgtatctccatatggtgtc

SEQ ID NO: 2917 - DNA, 25 bp, Artificial Sequence
  Probe
actgaaggatcgcccaacgtttttg

SEQ ID NO: 2918 - DNA, 25 bp, Artificial Sequence
  Probe
tacagttctccaggtgtggaatgat

SEQ ID NO: 2919 - DNA, 25 bp, Artificial Sequence
  Probe
gtcaatacgattgcttggccttttc

SEQ ID NO: 2920 - DNA, 25 bp, Artificial Sequence
  Probe
cagcaacactccttgtaaggggcag

SEQ ID NO: 2921 - DNA, 25 bp, Artificial Sequence
  Probe
taaggggcagagacagggtccacca

SEQ ID NO: 2922 - DNA, 25 bp, Artificial Sequence
  Probe
tccaccaactccccaagatgaagaa

SEQ ID NO: 2923 - DNA, 25 bp, Artificial Sequence
  Probe
agatgaagaagccccttcaggccag

SEQ ID NO: 2924 - DNA, 25 bp, Artificial Sequence
  Probe
tcaggccagtcgtggtggctcatgc

SEQ ID NO: 2925 - DNA, 25 bp, Artificial Sequence
  Probe
cagcactttgcaaggccgaggaggg

SEQ ID NO: 2926 - DNA, 25 bp, Artificial Sequence
  Probe
ggaggctgcagcgagccaagatcgt

SEQ ID NO: 2927 - DNA, 25 bp, Artificial Sequence
  Probe
aggagaccataggatttggacccca

SEQ ID NO: 2928 - DNA, 25 bp, Artificial Sequence
  Probe
gaccccaaagggatgtgaactgatc

SEQ ID NO: 2929 - DNA, 25 bp, Artificial Sequence
  Probe
gagagatgcctcaggcttcagacct

SEQ ID NO: 2930 - DNA, 25 bp, Artificial Sequence
  Probe
cttcagaccttacctgggttttcag

SEQ ID NO: 2931 - DNA, 25 bp, Artificial Sequence
  Probe
agggtcctgcaaaaggctagctcgg

SEQ ID NO: 2932 - DNA, 25 bp, Artificial Sequence
  Probe
gctagctcggcactacactagggaa

SEQ ID NO: 2933 - DNA, 25 bp, Artificial Sequence
  Probe
actagggaatttgctcctgttctgt

SEQ ID NO: 2934 - DNA, 25 bp, Artificial Sequence
  Probe
tcacttgtcatggtctttcttggta

SEQ ID NO: 2935 - DNA, 25 bp, Artificial Sequence
  Probe
ggtattaaaggccaccatttgcaca

SEQ ID NO: 2936 - DNA, 25 bp, Artificial Sequence
  Probe
caggaaacggcaacaagcctcccag

SEQ ID NO: 2937 - DNA, 25 bp, Artificial Sequence
  Probe
gcctcccagtactgacctgaaaact

SEQ ID NO: 2938 - DNA, 25 bp, Artificial Sequence
  Probe
gaagaacaccaacaagtgctccctg

SEQ ID NO: 2939 - DNA, 25 bp, Artificial Sequence
  Probe
caccccggaagctgaacctgaggga

SEQ ID NO: 2940 - DNA, 25 bp, Artificial Sequence
  Probe
aaggagctgactgggattcagtcac

SEQ ID NO: 2941 - DNA, 25 bp, Artificial Sequence
  Probe
tgacttggagccgctcgggggaagt

SEQ ID NO: 2942 - DNA, 25 bp, Artificial Sequence
  Probe
gacttggagccgctcgggggaagtc

SEQ ID NO: 2943 - DNA, 25 bp, Artificial Sequence
  Probe
tttctcggcagtcaggccaggaggg

SEQ ID NO: 2944 - DNA, 25 bp, Artificial Sequence
  Probe
cttcctcacaatttggtttgtgctg

SEQ ID NO: 2945 - DNA, 25 bp, Artificial Sequence
  Probe
gtttgtgctgcaaggggagggtccc

SEQ ID NO: 2946 - DNA, 25 bp, Artificial Sequence
  Probe
gtgctgcaaggggagggtccccatc

SEQ ID NO: 2947 - DNA, 25 bp, Artificial Sequence
  Probe
gcaaggggagggtccccatcatctg

SEQ ID NO: 2948 - DNA, 25 bp, Artificial Sequence
  Probe
caaggggagggtccccatcatctgg

SEQ ID NO: 2949 - DNA, 25 bp, Artificial Sequence
  Probe
gccccagtggtgtaaggagctgact

SEQ ID NO: 2950 - DNA, 25 bp, Artificial Sequence
  Probe
ggtgtaaggagctgactgggattca

SEQ ID NO: 2951 - DNA, 25 bp, Artificial Sequence
  Probe
gagagctaacgtttgatagttctaa

SEQ ID NO: 2952 - DNA, 25 bp, Artificial Sequence
  Probe
gaatccttatagaatttgtctttta

SEQ ID NO: 2953 - DNA, 25 bp, Artificial Sequence
  Probe
aaattactcttctttaatgctaagt

SEQ ID NO: 2954 - DNA, 25 bp, Artificial Sequence
  Probe
aatgctaagtattgacacatcgttg

SEQ ID NO: 2955 - DNA, 25 bp, Artificial Sequence
  Probe
ttgacacatcgttgtttgtttttca

SEQ ID NO: 2956 - DNA, 25 bp, Artificial Sequence
  Probe
tttcattgtttttgcggattgagag

SEQ ID NO: 2957 - DNA, 25 bp, Artificial Sequence
  Probe
gcggattgagagacttggtccatct

SEQ ID NO: 2958 - DNA, 25 bp, Artificial Sequence
  Probe
acttggtccatcttgtctcaggaga

SEQ ID NO: 2959 - DNA, 25 bp, Artificial Sequence
  Probe
gaaacctttctccaatgtagcagaa

SEQ ID NO: 2960 - DNA, 25 bp, Artificial Sequence
  Probe
tatcctcttccctgtattatagcaa

SEQ ID NO: 2961 - DNA, 25 bp, Artificial Sequence
  Probe
ttaaagatttttgaggccgggcaca

SEQ ID NO: 2962 - DNA, 25 bp, Artificial Sequence
  Probe
ttacagactctagctttccttatta

SEQ ID NO: 2963 - DNA, 25 bp, Artificial Sequence
  Probe
tattagcttaaactggggccctcaa

SEQ ID NO: 2964 - DNA, 25 bp, Artificial Sequence
  Probe
ccctcaaagagcagcctgttgatct

SEQ ID NO: 2965 - DNA, 25 bp, Artificial Sequence
  Probe
taaactgtatacctttactactgaa

SEQ ID NO: 2966 - DNA, 25 bp, Artificial Sequence
  Probe
tgggttccatccattagctttttaa

SEQ ID NO: 2967 - DNA, 25 bp, Artificial Sequence
  Probe
gatctggtattgatttccttcctgt

SEQ ID NO: 2968 - DNA, 25 bp, Artificial Sequence
  Probe
ggcacattcctttacaaccagtgtt

SEQ ID NO: 2969 - DNA, 25 bp, Artificial Sequence
  Probe
taaaccaccacgtaatcatcttctg

SEQ ID NO: 2970 - DNA, 25 bp, Artificial Sequence
  Probe
aacaaggggtgccagtgttgcctaa

SEQ ID NO: 2971 - DNA, 25 bp, Artificial Sequence
  Probe
gagtttaactgtgtccaggtggagt

SEQ ID NO: 2972 - DNA, 25 bp, Artificial Sequence
  Probe
gtatgacttctttagtgacctttta

SEQ ID NO: 2973 - DNA, 25 bp, Artificial Sequence
  Probe
gctgtgctttagataccagataaca

SEQ ID NO: 2974 - DNA, 25 bp, Artificial Sequence
  Probe
gtttcccctgaagatatgacctact

SEQ ID NO: 2975 - DNA, 25 bp, Artificial Sequence
  Probe
atgacctactagaactactcacata

SEQ ID NO: 2976 - DNA, 25 bp, Artificial Sequence
  Probe
gagtttctgtaccttgattattgac

SEQ ID NO: 2977 - DNA, 25 bp, Artificial Sequence
  Probe
ggggtggggaactggttcacaacat

SEQ ID NO: 2978 - DNA, 25 bp, Artificial Sequence
  Probe
gtaaggacaggtacccagtgatgat

SEQ ID NO: 2979 - DNA, 25 bp, Artificial Sequence
  Probe
tttattctttatcccaattaacttg

SEQ ID NO: 2980 - DNA, 25 bp, Artificial Sequence
  Probe
agcactcgattgcactatgacctcc

SEQ ID NO: 2981 - DNA, 25 bp, Artificial Sequence
  Probe
atgacctccttgagtgatgtgcagc

SEQ ID NO: 2982 - DNA, 25 bp, Artificial Sequence
  Probe
gtgagtgtgcgatcttcagtgtgtc

SEQ ID NO: 2983 - DNA, 25 bp, Artificial Sequence
  Probe
cagtgtgtctgcataagctaactta

SEQ ID NO: 2984 - DNA, 25 bp, Artificial Sequence
  Probe
tctggcggtgctgtgcttggaatag

SEQ ID NO: 2985 - DNA, 25 bp, Artificial Sequence
  Probe
agatcgtagctaatttgcatttctt

SEQ ID NO: 2986 - DNA, 25 bp, Artificial Sequence
  Probe
aaaacatactcttgtggattccatc

SEQ ID NO: 2987 - DNA, 25 bp, Artificial Sequence
  Probe
gtggattccatcaggagctggtttt

SEQ ID NO: 2988 - DNA, 25 bp, Artificial Sequence
  Probe
ggagctggttttgaaccgaggtgaa

SEQ ID NO: 2989 - DNA, 25 bp, Artificial Sequence
  Probe
aatgttagtcatgtgagttcttggg

SEQ ID NO: 2990 - DNA, 25 bp, Artificial Sequence
  Probe
acattatttcctgcaggaggtacaa

SEQ ID NO: 2991 - DNA, 25 bp, Artificial Sequence
  Probe
aggaggtacaaaggctgtgtgttca

SEQ ID NO: 2992 - DNA, 25 bp, Artificial Sequence
  Probe
ggctgtgtgttcatttgccagacgc

SEQ ID NO: 2993 - DNA, 25 bp, Artificial Sequence
  Probe
tgtgttcatttgccagacgcttttt

SEQ ID NO: 2994 - DNA, 25 bp, Artificial Sequence
  Probe
ttcatttgccagacgcttttttttt

SEQ ID NO: 2995 - DNA, 25 bp, Artificial Sequence
  Probe
acaataattagatctttttccaagt

SEQ ID NO: 2996 - DNA, 25 bp, Artificial Sequence
  Probe
cccttctcccagtcataggtggttt

SEQ ID NO: 2997 - DNA, 25 bp, Artificial Sequence
  Probe
ggtggtttttatcatcaagacagac

SEQ ID NO: 2998 - DNA, 25 bp, Artificial Sequence
  Probe
cagtgtttgatgtgcataatgccag

SEQ ID NO: 2999 - DNA, 25 bp, Artificial Sequence
  Probe
ttctctctttttgttcaatatgaga

SEQ ID NO: 3000 - DNA, 25 bp, Artificial Sequence
  Probe
gattcaggatcatatttgtttaaaa

SEQ ID NO: 3001 - DNA, 25 bp, Artificial Sequence
  Probe
ctgaaaatttactgtcggtctctga

SEQ ID NO: 3002 - DNA, 25 bp, Artificial Sequence
  Probe
gtcggtctctgacatgaaaccgtat

SEQ ID NO: 3003 - DNA, 25 bp, Artificial Sequence
  Probe
gaaaccgtattttgtcagtagttga

SEQ ID NO: 3004 - DNA, 25 bp, Artificial Sequence
  Probe
gtagttgaccaagcagttttatgag

SEQ ID NO: 3005 - DNA, 25 bp, Artificial Sequence
  Probe
gagaactcttctatgcaatgatgca

SEQ ID NO: 3006 - DNA, 25 bp, Artificial Sequence
  Probe
gcctgaccactgggtgtggacggtg

SEQ ID NO: 3007 - DNA, 25 bp, Artificial Sequence
  Probe
accactgggtgtggacggtgtgggg

SEQ ID NO: 3008 - DNA, 25 bp, Artificial Sequence
  Probe
gggcagccctgaaaggacaggctcc

SEQ ID NO: 3009 - DNA, 25 bp, Artificial Sequence
  Probe
gcagccctgaaaggacaggctcctg

SEQ ID NO: 3010 - DNA, 25 bp, Artificial Sequence
  Probe
tgcacccaccatgaggcatggagca

SEQ ID NO: 3011 - DNA, 25 bp, Artificial Sequence
  Probe
ccatgaggcatggagcagggcagag

SEQ ID NO: 3012 - DNA, 25 bp, Artificial Sequence
  Probe
ggagcagggcagagcaagggccccg

SEQ ID NO: 3013 - DNA, 25 bp, Artificial Sequence
  Probe
cccccactgtgaaggggctggccag

SEQ ID NO: 3014 - DNA, 25 bp, Artificial Sequence
  Probe
cacacacacactggacagtagatgg

SEQ ID NO: 3015 - DNA, 25 bp, Artificial Sequence
  Probe
ggacagtagatgggccgacacacac

SEQ ID NO: 3016 - DNA, 25 bp, Artificial Sequence
  Probe
agatgggccgacacacacttggccc

SEQ ID NO: 3017 - DNA, 25 bp, Artificial Sequence
  Probe
tgtccctaacagtccacaggcaaac

SEQ ID NO: 3018 - DNA, 25 bp, Artificial Sequence
  Probe
tcataagagccatctgtcacggacc

SEQ ID NO: 3019 - DNA, 25 bp, Artificial Sequence
  Probe
acccacgcccagaggaacgtgcaga

SEQ ID NO: 3020 - DNA, 25 bp, Artificial Sequence
  Probe
aagtgattctcccagaagcacaaag

SEQ ID NO: 3021 - DNA, 25 bp, Artificial Sequence
  Probe
aagcacaaagcatactcttgcccct

SEQ ID NO: 3022 - DNA, 25 bp, Artificial Sequence
  Probe
ccctcaggtgttgcttgtgtacatc

SEQ ID NO: 3023 - DNA, 25 bp, Artificial Sequence
  Probe
tgcttgtgtacatcgtacccatcca

SEQ ID NO: 3024 - DNA, 25 bp, Artificial Sequence
  Probe
agccaacggcctggaatcgcaaaga

SEQ ID NO: 3025 - DNA, 25 bp, Artificial Sequence
  Probe
aaagagacaccactctgggcagagc

SEQ ID NO: 3026 - DNA, 25 bp, Artificial Sequence
  Probe
ggagggacagagtgttggagggcca

SEQ ID NO: 3027 - DNA, 25 bp, Artificial Sequence
  Probe
ggagggccagagactagtcctgaga

SEQ ID NO: 3028 - DNA, 25 bp, Artificial Sequence
  Probe
cccagaacctaacatccttcaagaa

SEQ ID NO: 3029 - DNA, 25 bp, Artificial Sequence
  Probe
aggaaaagcatacagcctgggccgg

SEQ ID NO: 3030 - DNA, 25 bp, Artificial Sequence
  Probe
cctgggccgggctgagtatgggcgg

SEQ ID NO: 3031 - DNA, 25 bp, Artificial Sequence
  Probe
cctctgtggggtatgctgtgaccaa

SEQ ID NO: 3032 - DNA, 25 bp, Artificial Sequence
  Probe
ccaaggatggtcgtgttttcgcctg

SEQ ID NO: 3033 - DNA, 25 bp, Artificial Sequence
  Probe
caactaccagctgggcacagggcag

SEQ ID NO: 3034 - DNA, 25 bp, Artificial Sequence
  Probe
cgcctggagccctgtggagatgatg

SEQ ID NO: 3035 - DNA, 25 bp, Artificial Sequence
  Probe
gaaccgtgtggtcttatctgtgtcc

SEQ ID NO: 3036 - DNA, 25 bp, Artificial Sequence
  Probe
ggggccagcatacagtcttattagt

SEQ ID NO: 3037 - DNA, 25 bp, Artificial Sequence
  Probe
agagctgatgaagcctctgagggcc

SEQ ID NO: 3038 - DNA, 25 bp, Artificial Sequence
  Probe
cagctgcagatggcagcgggcctct

SEQ ID NO: 3039 - DNA, 25 bp, Artificial Sequence
  Probe
cagtggggagtgctgtgtctcctgg

SEQ ID NO: 3040 - DNA, 25 bp, Artificial Sequence
  Probe
gccaagcaggaactccaggtgcagg

SEQ ID NO: 3041 - DNA, 25 bp, Artificial Sequence
  Probe
tgggggctcttgcgtggtgagagta

SEQ ID NO: 3042 - DNA, 25 bp, Artificial Sequence
  Probe
tgcgtggtgagagtaggggtccccc

SEQ ID NO: 3043 - DNA, 25 bp, Artificial Sequence
  Probe
ttggtggggaacagaacctccgcat

SEQ ID NO: 3044 - DNA, 25 bp, Artificial Sequence
  Probe
acctccgcatcgtgtagttttgtga

SEQ ID NO: 3045 - DNA, 25 bp, Artificial Sequence
  Probe
tacttgagctgtctgtaccccagaa

SEQ ID NO: 3046 - DNA, 25 bp, Artificial Sequence
  Probe
tgtaccccagaatcaaacacagaac

SEQ ID NO: 3047 - DNA, 25 bp, Artificial Sequence
  Probe
ctcagaatcctgcactcaaggtggc

SEQ ID NO: 3048 - DNA, 25 bp, Artificial Sequence
  Probe
taaacctggaaacatgtccttacta

SEQ ID NO: 3049 - DNA, 25 bp, Artificial Sequence
  Probe
acatgtccttactaggtgttttatc

SEQ ID NO: 3050 - DNA, 25 bp, Artificial Sequence
  Probe
ttcctcaccctcataatggacctta

SEQ ID NO: 3051 - DNA, 25 bp, Artificial Sequence
  Probe
gactgagtttcttcaagcatccact

SEQ ID NO: 3052 - DNA, 25 bp, Artificial Sequence
  Probe
tccacttgtgctaccaggctgagaa

SEQ ID NO: 3053 - DNA, 25 bp, Artificial Sequence
  Probe
gaccccatctgggcatcatttaacc

SEQ ID NO: 3054 - DNA, 25 bp, Artificial Sequence
  Probe
agattcctgtctctaatccagacct

SEQ ID NO: 3055 - DNA, 25 bp, Artificial Sequence
  Probe
tagctgggaccttgggagtgtcacc

SEQ ID NO: 3056 - DNA, 25 bp, Artificial Sequence
  Probe
aagacttgagtggcctgactgggtg

SEQ ID NO: 3057 - DNA, 25 bp, Artificial Sequence
  Probe
ggtgcttcctaagtcggggagacca

SEQ ID NO: 3058 - DNA, 25 bp, Artificial Sequence
  Probe
tccaactcgtgctgatagctggccg

SEQ ID NO: 3059 - DNA, 25 bp, Artificial Sequence
  Probe
tgcacagccctgagtggcttcacat

SEQ ID NO: 3060 - DNA, 25 bp, Artificial Sequence
  Probe
ttcacatctcttggtcagtgtcttc

SEQ ID NO: 3061 - DNA, 25 bp, Artificial Sequence
  Probe
gaagttcgaccccaacgagatcaaa

SEQ ID NO: 3062 - DNA, 25 bp, Artificial Sequence
  Probe
agtcgtatacctgaggtgcaccgga

SEQ ID NO: 3063 - DNA, 25 bp, Artificial Sequence
  Probe
gcaacgggtgactggaagggcctga

SEQ ID NO: 3064 - DNA, 25 bp, Artificial Sequence
  Probe
gaccattcagaacagacaggcccag

SEQ ID NO: 3065 - DNA, 25 bp, Artificial Sequence
  Probe
ggcccagattgaggtggtgccttct

SEQ ID NO: 3066 - DNA, 25 bp, Artificial Sequence
  Probe
tcgacagatgcggcaccgatcctta

SEQ ID NO: 3067 - DNA, 25 bp, Artificial Sequence
  Probe
accgatccttagccagagaactctc

SEQ ID NO: 3068 - DNA, 25 bp, Artificial Sequence
  Probe
agatcctggggactgcccagtcagt

SEQ ID NO: 3069 - DNA, 25 bp, Artificial Sequence
  Probe
ggctgtaatgttgatggccgccatc

SEQ ID NO: 3070 - DNA, 25 bp, Artificial Sequence
  Probe
cgccatcctcatgacatcatcgatg

SEQ ID NO: 3071 - DNA, 25 bp, Artificial Sequence
  Probe
gtggtgctgtggaatgcccagccag

SEQ ID NO: 3072 - DNA, 25 bp, Artificial Sequence
  Probe
gaagttcgaccccaacgagatcaaa

SEQ ID NO: 3073 - DNA, 25 bp, Artificial Sequence
  Probe
agtcgtatacctgaggtgcaccgga

SEQ ID NO: 3074 - DNA, 25 bp, Artificial Sequence
  Probe
gcaacgggtgactggaagggcctga

SEQ ID NO: 3075 - DNA, 25 bp, Artificial Sequence
  Probe
gaccattcagaacagacaggcccag

SEQ ID NO: 3076 - DNA, 25 bp, Artificial Sequence
  Probe
ggcccagattgaggtggtgccttct

SEQ ID NO: 3077 - DNA, 25 bp, Artificial Sequence
  Probe
tcgacagatgcggcaccgatcctta

SEQ ID NO: 3078 - DNA, 25 bp, Artificial Sequence
  Probe
accgatccttagccagagaactctc

SEQ ID NO: 3079 - DNA, 25 bp, Artificial Sequence
  Probe
agatcctggggactgcccagtcagt

SEQ ID NO: 3080 - DNA, 25 bp, Artificial Sequence
  Probe
ggctgtaatgttgatggccgccatc

SEQ ID NO: 3081 - DNA, 25 bp, Artificial Sequence
  Probe
cgccatcctcatgacatcatcgatg

SEQ ID NO: 3082 - DNA, 25 bp, Artificial Sequence
  Probe
gtggtgctgtggaatgcccagccag

SEQ ID NO: 3083 - DNA, 25 bp, Artificial Sequence
  Probe
gaggtgaagtcggtgccacttctgc

SEQ ID NO: 3084 - DNA, 25 bp, Artificial Sequence
  Probe
gcaacgggtgactggaagggcctga

SEQ ID NO: 3085 - DNA, 25 bp, Artificial Sequence
  Probe
ggcccagattgaggtggtgccttct

SEQ ID NO: 3086 - DNA, 25 bp, Artificial Sequence
  Probe
ccctgatcatcaaagccctcaagga

SEQ ID NO: 3087 - DNA, 25 bp, Artificial Sequence
  Probe
tcgtcccgaatccgggttcatccga

SEQ ID NO: 3088 - DNA, 25 bp, Artificial Sequence
  Probe
tcgacagatgcggcaccgatcctta

SEQ ID NO: 3089 - DNA, 25 bp, Artificial Sequence
  Probe
accgatccttagccagagaactctc

SEQ ID NO: 3090 - DNA, 25 bp, Artificial Sequence
  Probe
agatcctggggactgcccagtcagt

SEQ ID NO: 3091 - DNA, 25 bp, Artificial Sequence
  Probe
tgttgatggccgccatcctcatgac

SEQ ID NO: 3092 - DNA, 25 bp, Artificial Sequence
  Probe
gtggtgctgtggaatgcccagccag

SEQ ID NO: 3093 - DNA, 25 bp, Artificial Sequence
  Probe
gaagttcgaccccaacgagatcaaa

SEQ ID NO: 3094 - DNA, 25 bp, Artificial Sequence
  Probe
gcaacgggtgactggaagggcctga

SEQ ID NO: 3095 - DNA, 25 bp, Artificial Sequence
  Probe
gaccattcagaacagacaggcccag

SEQ ID NO: 3096 - DNA, 25 bp, Artificial Sequence
  Probe
ggcccagattgaggtggtgccttct

SEQ ID NO: 3097 - DNA, 25 bp, Artificial Sequence
  Probe
ccctgatcatcaaagccctcaagga

SEQ ID NO: 3098 - DNA, 25 bp, Artificial Sequence
  Probe
aacattgctcgacagatgcggcacc

SEQ ID NO: 3099 - DNA, 25 bp, Artificial Sequence
  Probe
agatcctggggactgcccagtcagt

SEQ ID NO: 3100 - DNA, 25 bp, Artificial Sequence
  Probe
tgttgatggccgccatcctcatgac

SEQ ID NO: 3101 - DNA, 25 bp, Artificial Sequence
  Probe
agtggtgctgtggaatgcccagccg

SEQ ID NO: 3102 - DNA, 25 bp, Artificial Sequence
  Probe
tgcccagccgtaagtgacattttca

SEQ ID NO: 3103 - DNA, 25 bp, Artificial Sequence
  Probe
gttactggtggggtgggataatcct

SEQ ID NO: 3104 - DNA, 25 bp, Artificial Sequence
  Probe
ttttctttcccacagagttaagcac

SEQ ID NO: 3105 - DNA, 25 bp, Artificial Sequence
  Probe
tcagaacagggctttggtcgatgga

SEQ ID NO: 3106 - DNA, 25 bp, Artificial Sequence
  Probe
ggctttggtcgatggaccttgcact

SEQ ID NO: 3107 - DNA, 25 bp, Artificial Sequence
  Probe
tgcctttcaagtgcatgcagctcac

SEQ ID NO: 3108 - DNA, 25 bp, Artificial Sequence
  Probe
atgcagctcactgatttcatcctca

SEQ ID NO: 3109 - DNA, 25 bp, Artificial Sequence
  Probe
aaatgggcagccacacgatgggcca

SEQ ID NO: 3110 - DNA, 25 bp, Artificial Sequence
  Probe
ggcagccacacgatgggccaagaag

SEQ ID NO: 3111 - DNA, 25 bp, Artificial Sequence
  Probe
aagatgacagattttgatcgtttta

SEQ ID NO: 3112 - DNA, 25 bp, Artificial Sequence
  Probe
gaagcttcaaaaggcagctctcctg

SEQ ID NO: 3113 - DNA, 25 bp, Artificial Sequence
  Probe
tcccaaaaaagcacctggtactaag

SEQ ID NO: 3114 - DNA, 25 bp, Artificial Sequence
  Probe
gcacctggtactaagggtactgctg

SEQ ID NO: 3115 - DNA, 25 bp, Artificial Sequence
  Probe
tgctgctgctaaagttccagcaaaa

SEQ ID NO: 3116 - DNA, 25 bp, Artificial Sequence
  Probe
tcagaacagggctttggtcgatgga

SEQ ID NO: 3117 - DNA, 25 bp, Artificial Sequence
  Probe
ggctttggtcgatggaccttgcact

SEQ ID NO: 3118 - DNA, 25 bp, Artificial Sequence
  Probe
tgcctttcaagtgcatgcagctcac

SEQ ID NO: 3119 - DNA, 25 bp, Artificial Sequence
  Probe
atgcagctcactgatttcatcctca

SEQ ID NO: 3120 - DNA, 25 bp, Artificial Sequence
  Probe
aaatgggcagccacacgatgggcca

SEQ ID NO: 3121 - DNA, 25 bp, Artificial Sequence
  Probe
ggcagccacacgatgggccaagaag

SEQ ID NO: 3122 - DNA, 25 bp, Artificial Sequence
  Probe
aagatgacagattttgatcgtttta

SEQ ID NO: 3123 - DNA, 25 bp, Artificial Sequence
  Probe
gaagcttcaaaaggcagctctcctg

SEQ ID NO: 3124 - DNA, 25 bp, Artificial Sequence
  Probe
tcccaaaaaagcacctggtactaag

SEQ ID NO: 3125 - DNA, 25 bp, Artificial Sequence
  Probe
gcacctggtactaagggtactgctg

SEQ ID NO: 3126 - DNA, 25 bp, Artificial Sequence
  Probe
tgctgctgctaaagttccagcaaaa

SEQ ID NO: 3127 - DNA, 25 bp, Artificial Sequence
  Probe
ggcagacatcaatacaaaatgggca

SEQ ID NO: 3128 - DNA, 25 bp, Artificial Sequence
  Probe
agcaaaaaagatcaccgccgcgagt

SEQ ID NO: 3129 - DNA, 25 bp, Artificial Sequence
  Probe
gccgcgagtaaaaaggctccagccc

SEQ ID NO: 3130 - DNA, 25 bp, Artificial Sequence
  Probe
taaaaaggctccagcccagaaggtt

SEQ ID NO: 3131 - DNA, 25 bp, Artificial Sequence
  Probe
caggccagaaagcagcgcctgctcc

SEQ ID NO: 3132 - DNA, 25 bp, Artificial Sequence
  Probe
cgcctgctccaaaagctcagaaggg

SEQ ID NO: 3133 - DNA, 25 bp, Artificial Sequence
  Probe
gaagggtcaaaaagctccagcccag

SEQ ID NO: 3134 - DNA, 25 bp, Artificial Sequence
  Probe
aaaaagctccagcccagaaagcacc

SEQ ID NO: 3135 - DNA, 25 bp, Artificial Sequence
  Probe
agaaagcacctgctccaaaggcatc

SEQ ID NO: 3136 - DNA, 25 bp, Artificial Sequence
  Probe
acctgctccaaaggcatctggcaag

SEQ ID NO: 3137 - DNA, 25 bp, Artificial Sequence
  Probe
catctggcaagaaagcataagtggc

SEQ ID NO: 3138 - DNA, 25 bp, Artificial Sequence
  Probe
ggaaccaagaagcgggtgctcaccc

SEQ ID NO: 3139 - DNA, 25 bp, Artificial Sequence
  Probe
aagtccttgctggtgcagacgaagc

SEQ ID NO: 3140 - DNA, 25 bp, Artificial Sequence
  Probe
ttaagttcattgacaccacctccaa

SEQ ID NO: 3141 - DNA, 25 bp, Artificial Sequence
  Probe
gcctgcgcaaggtggcctgtattgg

SEQ ID NO: 3142 - DNA, 25 bp, Artificial Sequence
  Probe
tgtattggggcatggcatcctgctc

SEQ ID NO: 3143 - DNA, 25 bp, Artificial Sequence
  Probe
gcacgcgctgggcagaaaggctacc

SEQ ID NO: 3144 - DNA, 25 bp, Artificial Sequence
  Probe
taccatcaccgcactgagatcaaca

SEQ ID NO: 3145 - DNA, 25 bp, Artificial Sequence
  Probe
gattggccagggctaccttatcaag

SEQ ID NO: 3146 - DNA, 25 bp, Artificial Sequence
  Probe
gatcaagaacaatgcctccactgac

SEQ ID NO: 3147 - DNA, 25 bp, Artificial Sequence
  Probe
ctccactgactatgacctatctgac

SEQ ID NO: 3148 - DNA, 25 bp, Artificial Sequence
  Probe
tcaaccctctgggtggctttgtcca

SEQ ID NO: 3149 - DNA, 25 bp, Artificial Sequence
  Probe
tgtgggcattgtgggctacgtggaa

SEQ ID NO: 3150 - DNA, 25 bp, Artificial Sequence
  Probe
ctccggaccttcaagactgtctttg

SEQ ID NO: 3151 - DNA, 25 bp, Artificial Sequence
  Probe
gaaggcctttaccaagtactgcaag

SEQ ID NO: 3152 - DNA, 25 bp, Artificial Sequence
  Probe
agaagtactgccaagtcatccgtgt

SEQ ID NO: 3153 - DNA, 25 bp, Artificial Sequence
  Probe
gcttcctctgcgccagaagaaggcc

SEQ ID NO: 3154 - DNA, 25 bp, Artificial Sequence
  Probe
agaaggcccacctgatggagatcca

SEQ ID NO: 3155 - DNA, 25 bp, Artificial Sequence
  Probe
gcactgtggccgagaagctggactg

SEQ ID NO: 3156 - DNA, 25 bp, Artificial Sequence
  Probe
gaggcttgagcagcaggtacctgtg

SEQ ID NO: 3157 - DNA, 25 bp, Artificial Sequence
  Probe
caaaggggtcaccagtcgttggcac

SEQ ID NO: 3158 - DNA, 25 bp, Artificial Sequence
  Probe
gcctgcgcaaggtggcctgtattgg

SEQ ID NO: 3159 - DNA, 25 bp, Artificial Sequence
  Probe
cctgtattggggcatggcatcctgt

SEQ ID NO: 3160 - DNA, 25 bp, Artificial Sequence
  Probe
gcacgcgctgggcagaaaggctacc

SEQ ID NO: 3161 - DNA, 25 bp, Artificial Sequence
  Probe
taccatcaccgcactgagatcaaca

SEQ ID NO: 3162 - DNA, 25 bp, Artificial Sequence
  Probe
gattggccagggctaccttatcaag

SEQ ID NO: 3163 - DNA, 25 bp, Artificial Sequence
  Probe
gatcaagaacaatgcctccactgac

SEQ ID NO: 3164 - DNA, 25 bp, Artificial Sequence
  Probe
ctccactgactatgacctatctgac

SEQ ID NO: 3165 - DNA, 25 bp, Artificial Sequence
  Probe
cctctgggtggctttgtccactatg

SEQ ID NO: 3166 - DNA, 25 bp, Artificial Sequence
  Probe
ggaaccaagaagcgggtgctcaccc

SEQ ID NO: 3167 - DNA, 25 bp, Artificial Sequence
  Probe
aagtccttgctggtgcagacgaagc

SEQ ID NO: 3168 - DNA, 25 bp, Artificial Sequence
  Probe
gaagcggcgggctctggagaagatt

SEQ ID NO: 3169 - DNA, 25 bp, Artificial Sequence
  Probe
ttaagttcattgacaccacctccaa

SEQ ID NO: 3170 - DNA, 25 bp, Artificial Sequence
  Probe
ctccaagtttggccatggccgcttc

SEQ ID NO: 3171 - DNA, 25 bp, Artificial Sequence
  Probe
ggaaccaagaagcgggtgctcaccc

SEQ ID NO: 3172 - DNA, 25 bp, Artificial Sequence
  Probe
tggtgcagatgaaacggcaggctct

SEQ ID NO: 3173 - DNA, 25 bp, Artificial Sequence
  Probe
ttaagttcattgacaccacctccaa

SEQ ID NO: 3174 - DNA, 25 bp, Artificial Sequence
  Probe
accacctccaagtttggccatggct

SEQ ID NO: 3175 - DNA, 25 bp, Artificial Sequence
  Probe
caaaggggtcaccagtcgttggcac

SEQ ID NO: 3176 - DNA, 25 bp, Artificial Sequence
  Probe
ttggcacaccaagaagctgccctgc

SEQ ID NO: 3177 - DNA, 25 bp, Artificial Sequence
  Probe
tgtattggggcatggcatcctgctc

SEQ ID NO: 3178 - DNA, 25 bp, Artificial Sequence
  Probe
ctggggagaaaggctaccgtcaccg

SEQ ID NO: 3179 - DNA, 25 bp, Artificial Sequence
  Probe
gattggccagggctaccttatcaag

SEQ ID NO: 3180 - DNA, 25 bp, Artificial Sequence
  Probe
gatcaagaacaatgcctccactgac

SEQ ID NO: 3181 - DNA, 25 bp, Artificial Sequence
  Probe
agagcaccaatcctctgggtggctt

SEQ ID NO: 3182 - DNA, 25 bp, Artificial Sequence
  Probe
acgctgctgaacatgctcaacatct

SEQ ID NO: 3183 - DNA, 25 bp, Artificial Sequence
  Probe
ctggtcatccagcaggtgttcgaca

SEQ ID NO: 3184 - DNA, 25 bp, Artificial Sequence
  Probe
ggcagcatctacaaccctgaagtgc

SEQ ID NO: 3185 - DNA, 25 bp, Artificial Sequence
  Probe
cagaggaaactctgcattctcgctt

SEQ ID NO: 3186 - DNA, 25 bp, Artificial Sequence
  Probe
cttcctggagggtgtccgcaatgtt

SEQ ID NO: 3187 - DNA, 25 bp, Artificial Sequence
  Probe
atgttgccagtgtctgtctgcagat

SEQ ID NO: 3188 - DNA, 25 bp, Artificial Sequence
  Probe
gattggctacccaactgttgcatca

SEQ ID NO: 3189 - DNA, 25 bp, Artificial Sequence
  Probe
agtaccccattctatcatcaacggg

SEQ ID NO: 3190 - DNA, 25 bp, Artificial Sequence
  Probe
tgtggagacggattacaccttccca

SEQ ID NO: 3191 - DNA, 25 bp, Artificial Sequence
  Probe
aaggtcaaggccttcttggctgatc

SEQ ID NO: 3192 - DNA, 25 bp, Artificial Sequence
  Probe
gcagccccagctaaggttgaagcca

SEQ ID NO: 3193 - DNA, 25 bp, Artificial Sequence
  Probe
gcttcacacggcagacgccggtgga

SEQ ID NO: 3194 - DNA, 25 bp, Artificial Sequence
  Probe
agacgccggtggacagtcctgatga

SEQ ID NO: 3195 - DNA, 25 bp, Artificial Sequence
  Probe
tcagcgagagtgccaaccaggcctt

SEQ ID NO: 3196 - DNA, 25 bp, Artificial Sequence
  Probe
atcaaggagggcttctccttccagc

SEQ ID NO: 3197 - DNA, 25 bp, Artificial Sequence
  Probe
tccagggcgctaggaagccgggtgg

SEQ ID NO: 3198 - DNA, 25 bp, Artificial Sequence
  Probe
tgggggtgagggtagcccttgagcc

SEQ ID NO: 3199 - DNA, 25 bp, Artificial Sequence
  Probe
tgtccctgcggctgtgagagcagca

SEQ ID NO: 3200 - DNA, 25 bp, Artificial Sequence
  Probe
gttccagagacctgggggtgtgtct

SEQ ID NO: 3201 - DNA, 25 bp, Artificial Sequence
  Probe
ggtggggtgtgagtgcgtatgaaag

SEQ ID NO: 3202 - DNA, 25 bp, Artificial Sequence
  Probe
tgcgtatgaaagtgtgtgtctgctg

SEQ ID NO: 3203 - DNA, 25 bp, Artificial Sequence
  Probe
ctgaatcatgggcacggagggccgc

SEQ ID NO: 3204 - DNA, 25 bp, Artificial Sequence
  Probe
cactggagacagtcatccgacgggc

SEQ ID NO: 3205 - DNA, 25 bp, Artificial Sequence
  Probe
cagggtccacgagctcaagattgaa

SEQ ID NO: 3206 - DNA, 25 bp, Artificial Sequence
  Probe
atatgtgcagcgggggctacagcga

SEQ ID NO: 3207 - DNA, 25 bp, Artificial Sequence
  Probe
ggctacagcgagtggggctagatcc

SEQ ID NO: 3208 - DNA, 25 bp, Artificial Sequence
  Probe
tggcccaggagaaccgtgtggtggc

SEQ ID NO: 3209 - DNA, 25 bp, Artificial Sequence
  Probe
tggagacgcttattctactggaccg

SEQ ID NO: 3210 - DNA, 25 bp, Artificial Sequence
  Probe
gaactctctcccagaaacctggttc

SEQ ID NO: 3211 - DNA, 25 bp, Artificial Sequence
  Probe
gagactgaagacagctgatgcagcc

SEQ ID NO: 3212 - DNA, 25 bp, Artificial Sequence
  Probe
catctcagaccccatcatctgaaag

SEQ ID NO: 3213 - DNA, 25 bp, Artificial Sequence
  Probe
cagtggcagagtacatctcatccag

SEQ ID NO: 3214 - DNA, 25 bp, Artificial Sequence
  Probe
tctcatccagagaaacagcatcctg

SEQ ID NO: 3215 - DNA, 25 bp, Artificial Sequence
  Probe
ctctccaaatgaggaccagtaactg

SEQ ID NO: 3216 - DNA, 25 bp, Artificial Sequence
  Probe
gtaactgagaagtagctgaggagaa

SEQ ID NO: 3217 - DNA, 25 bp, Artificial Sequence
  Probe
gcaatgccaaagtgacatgggtcct

SEQ ID NO: 3218 - DNA, 25 bp, Artificial Sequence
  Probe
aaagtgacatgggtccttggtgatg

SEQ ID NO: 3219 - DNA, 25 bp, Artificial Sequence
  Probe
gggtccttggtgatgagggagcaca

SEQ ID NO: 3220 - DNA, 25 bp, Artificial Sequence
  Probe
ggggaagaatccagggttgtcatca

SEQ ID NO: 3221 - DNA, 25 bp, Artificial Sequence
  Probe
aagaatccagggttgtcatcaccac

SEQ ID NO: 3222 - DNA, 25 bp, Artificial Sequence
  Probe
gtcatcaccactgagtatggatttc

SEQ ID NO: 3223 - DNA, 25 bp, Artificial Sequence
  Probe
cactgagtatggatttcacattcta

SEQ ID NO: 3224 - DNA, 25 bp, Artificial Sequence
  Probe
ccctggtccacatgtagaccctgag

SEQ ID NO: 3225 - DNA, 25 bp, Artificial Sequence
  Probe
acatgtagaccctgagctgtagacc

SEQ ID NO: 3226 - DNA, 25 bp, Artificial Sequence
  Probe
ctggctgccccttattggagaatgt

SEQ ID NO: 3227 - DNA, 25 bp, Artificial Sequence
  Probe
atttccaagacaatcaatccacaag

SEQ ID NO: 3228 - DNA, 25 bp, Artificial Sequence
  Probe
gttcatagacgacaatgccactaca

SEQ ID NO: 3229 - DNA, 25 bp, Artificial Sequence
  Probe
accaaacggatgaaactctgagcaa

SEQ ID NO: 3230 - DNA, 25 bp, Artificial Sequence
  Probe
atgacagcagtctttgtgatttatt

SEQ ID NO: 3231 - DNA, 25 bp, Artificial Sequence
  Probe
taactttctgcaagacctttggctc

SEQ ID NO: 3232 - DNA, 25 bp, Artificial Sequence
  Probe
agacctttggctcacagaactgcag

SEQ ID NO: 3233 - DNA, 25 bp, Artificial Sequence
  Probe
gagaaaccaactacggattgctgca

SEQ ID NO: 3234 - DNA, 25 bp, Artificial Sequence
  Probe
tacggattgctgcaaaccacacctt

SEQ ID NO: 3235 - DNA, 25 bp, Artificial Sequence
  Probe
cttctctttcttatgtctttttact

SEQ ID NO: 3236 - DNA, 25 bp, Artificial Sequence
  Probe
gcagcagcctcaccatgaagttgct

SEQ ID NO: 3237 - DNA, 25 bp, Artificial Sequence
  Probe
gactcccgagggctagggctagagc

SEQ ID NO: 3238 - DNA, 25 bp, Artificial Sequence
  Probe
ttcatacctctacatgtctgcttga

SEQ ID NO: 3239 - DNA, 25 bp, Artificial Sequence
  Probe
ctgccagagaactcctatgcatccc

SEQ ID NO: 3240 - DNA, 25 bp, Artificial Sequence
  Probe
ttacttttgtgaacgcttctgccac

SEQ ID NO: 3241 - DNA, 25 bp, Artificial Sequence
  Probe
gtcttccccaaaattgatcactccg

SEQ ID NO: 3242 - DNA, 25 bp, Artificial Sequence
  Probe
ctcccgtagcacactataacatctg

SEQ ID NO: 3243 - DNA, 25 bp, Artificial Sequence
  Probe
gctggagtgttgctgttgcaccata

SEQ ID NO: 3244 - DNA, 25 bp, Artificial Sequence
  Probe
gttgcaccatactttcttgtacatt

SEQ ID NO: 3245 - DNA, 25 bp, Artificial Sequence
  Probe
taagtgccttgcggtcagggactga

SEQ ID NO: 3246 - DNA, 25 bp, Artificial Sequence
  Probe
gaatcttgcccgtttatgtatgctc

SEQ ID NO: 3247 - DNA, 25 bp, Artificial Sequence
  Probe
tatgtatgctccatgtctagcccat

SEQ ID NO: 3248 - DNA, 25 bp, Artificial Sequence
  Probe
accctcttccacacatgtatgtgat

SEQ ID NO: 3249 - DNA, 25 bp, Artificial Sequence
  Probe
aaaggatcttgttcccgatttgagc

SEQ ID NO: 3250 - DNA, 25 bp, Artificial Sequence
  Probe
gttcccgatttgagcaacttctatg

SEQ ID NO: 3251 - DNA, 25 bp, Artificial Sequence
  Probe
tttgagcaacttctatgcacagtac

SEQ ID NO: 3252 - DNA, 25 bp, Artificial Sequence
  Probe
aggatgaatctcaggaaggcaagca

SEQ ID NO: 3253 - DNA, 25 bp, Artificial Sequence
  Probe
gcagtccatagaagagcgtgagaaa

SEQ ID NO: 3254 - DNA, 25 bp, Artificial Sequence
  Probe
aagagcgtgagaaactggacgggct

SEQ ID NO: 3255 - DNA, 25 bp, Artificial Sequence
  Probe
ggaacggagacaaatatctggggcc

SEQ ID NO: 3256 - DNA, 25 bp, Artificial Sequence
  Probe
atatctggggcctgcagttcttatg

SEQ ID NO: 3257 - DNA, 25 bp, Artificial Sequence
  Probe
ctgcagttcttatgcaggcctatcg

SEQ ID NO: 3258 - DNA, 25 bp, Artificial Sequence
  Probe
gatgacttcacagaggagcgcctgg

SEQ ID NO: 3259 - DNA, 25 bp, Artificial Sequence
  Probe
tggaaaggcttgatcgtgctcacag

SEQ ID NO: 3260 - DNA, 25 bp, Artificial Sequence
  Probe
cacaggcagtgagagccccatcgtg

SEQ ID NO: 3261 - DNA, 25 bp, Artificial Sequence
  Probe
ccccatcgtggtggtgctgagtggc

SEQ ID NO: 3262 - DNA, 25 bp, Artificial Sequence
  Probe
tgagtggcagtatggagccggcctt

SEQ ID NO: 3263 - DNA, 25 bp, Artificial Sequence
  Probe
tcacagaggagacctcctgttcctc

SEQ ID NO: 3264 - DNA, 25 bp, Artificial Sequence
  Probe
tcctgttcctcacaaatttccggga

SEQ ID NO: 3265 - DNA, 25 bp, Artificial Sequence
  Probe
gggaagacccaatcagagctggtga

SEQ ID NO: 3266 - DNA, 25 bp, Artificial Sequence
  Probe
gacgagacattccaatagttcacag

SEQ ID NO: 3267 - DNA, 25 bp, Artificial Sequence
  Probe
ggaagagcaagagggtttttaccat

SEQ ID NO: 3268 - DNA, 25 bp, Artificial Sequence
  Probe
tatgctcttttggctgtaatgggtg

SEQ ID NO: 3269 - DNA, 25 bp, Artificial Sequence
  Probe
atttgagatgttccattttctgtat

SEQ ID NO: 3270 - DNA, 25 bp, Artificial Sequence
  Probe
cctcgccgtctgtgaattggaccat

SEQ ID NO: 3271 - DNA, 25 bp, Artificial Sequence
  Probe
ggaccatcctatttaactggcttca

SEQ ID NO: 3272 - DNA, 25 bp, Artificial Sequence
  Probe
ttttcagttggctgacttccacacc

SEQ ID NO: 3273 - DNA, 25 bp, Artificial Sequence
  Probe
ccacacctagcatctcatgagtgcc

SEQ ID NO: 3274 - DNA, 25 bp, Artificial Sequence
  Probe
tagcctgcgctgttttttagtttgg

SEQ ID NO: 3275 - DNA, 25 bp, Artificial Sequence
  Probe
tttatgagacccattcctatttctt

SEQ ID NO: 3276 - DNA, 25 bp, Artificial Sequence
  Probe
gtcaatgtttcttttatcacgatat

SEQ ID NO: 3277 - DNA, 25 bp, Artificial Sequence
  Probe
gaccttttatccacttacctagatt

SEQ ID NO: 3278 - DNA, 25 bp, Artificial Sequence
  Probe
caccacttcttttataactagtcct

SEQ ID NO: 3279 - DNA, 25 bp, Artificial Sequence
  Probe
tagtcctttactaatccaacccatg

SEQ ID NO: 3280 - DNA, 25 bp, Artificial Sequence
  Probe
ctcttcctggcttcttactgaaagg

SEQ ID NO: 3281 - DNA, 25 bp, Artificial Sequence
  Probe
agttagcccccatagaatgtgaccc

SEQ ID NO: 3282 - DNA, 25 bp, Artificial Sequence
  Probe
gaatgtgaccctgtctgcagagtct

SEQ ID NO: 3283 - DNA, 25 bp, Artificial Sequence
  Probe
tgtctgcagagtctcatttacccct

SEQ ID NO: 3284 - DNA, 25 bp, Artificial Sequence
  Probe
gttggctttattagggctgtcttac

SEQ ID NO: 3285 - DNA, 25 bp, Artificial Sequence
  Probe
gttggcatttactatcatgtcttta

SEQ ID NO: 3286 - DNA, 25 bp, Artificial Sequence
  Probe
atcaccatataattcgttgcccaaa

SEQ ID NO: 3287 - DNA, 25 bp, Artificial Sequence
  Probe
aaaggcataaaccagacctgtccca

SEQ ID NO: 3288 - DNA, 25 bp, Artificial Sequence
  Probe
ggggctcatggatacgaggcctgag

SEQ ID NO: 3289 - DNA, 25 bp, Artificial Sequence
  Probe
gaagtgtggcttgctagtctgttac

SEQ ID NO: 3290 - DNA, 25 bp, Artificial Sequence
  Probe
gcttttctaaaattgcttcacgtgt

SEQ ID NO: 3291 - DNA, 25 bp, Artificial Sequence
  Probe
cttttccattcactttgtacttatt

SEQ ID NO: 3292 - DNA, 25 bp, Artificial Sequence
  Probe
gtgaggacggactgggagccggtac

SEQ ID NO: 3293 - DNA, 25 bp, Artificial Sequence
  Probe
ggagccggtacagactccagtgttt

SEQ ID NO: 3294 - DNA, 25 bp, Artificial Sequence
  Probe
cccctctctatgcaaacacgtaaaa

SEQ ID NO: 3295 - DNA, 25 bp, Artificial Sequence
  Probe
tcagagccagtggctggtcttccat

SEQ ID NO: 3296 - DNA, 25 bp, Artificial Sequence
  Probe
tacagtgtcactattccctgacgga

SEQ ID NO: 3297 - DNA, 25 bp, Artificial Sequence
  Probe
ttccctgacggagctgttatgtgcc

SEQ ID NO: 3298 - DNA, 25 bp, Artificial Sequence
  Probe
ttatgtgccgctctagcgaaggccc

SEQ ID NO: 3299 - DNA, 25 bp, Artificial Sequence
  Probe
ctaggcctaattgttcagcgtggag

SEQ ID NO: 3300 - DNA, 25 bp, Artificial Sequence
  Probe
agatggcaactcacgtggtgcccta

SEQ ID NO: 3301 - DNA, 25 bp, Artificial Sequence
  Probe
gcgtggtctggtatacatgctgcaa

SEQ ID NO: 3302 - DNA, 25 bp, Artificial Sequence
  Probe
tatcctctcccattattttcataag

SEQ ID NO: 3303 - DNA, 25 bp, Artificial Sequence
  Probe
gaaactcaccataatagtgccgtct

SEQ ID NO: 3304 - DNA, 25 bp, Artificial Sequence
  Probe
gggagtctggtggaactgtgttgga

SEQ ID NO: 3305 - DNA, 25 bp, Artificial Sequence
  Probe
ttaagataccttttcactcttccgt

SEQ ID NO: 3306 - DNA, 25 bp, Artificial Sequence
  Probe
tccgtatgtcatgagccttgtgcgt

SEQ ID NO: 3307 - DNA, 25 bp, Artificial Sequence
  Probe
gggtagactctgtaaacacctcctt

SEQ ID NO: 3308 - DNA, 25 bp, Artificial Sequence
  Probe
cacctccttactcactatagtcaag

SEQ ID NO: 3309 - DNA, 25 bp, Artificial Sequence
  Probe
atagtcaagaagtccagcggcgtcc

SEQ ID NO: 3310 - DNA, 25 bp, Artificial Sequence
  Probe
agcggcgtcccaatatagaggtccc

SEQ ID NO: 3311 - DNA, 25 bp, Artificial Sequence
  Probe
gcagtctgtccagaatagccagctc

SEQ ID NO: 3312 - DNA, 25 bp, Artificial Sequence
  Probe
atcctcagcagctcattcggggaat

SEQ ID NO: 3313 - DNA, 25 bp, Artificial Sequence
  Probe
ggggaatagtcagagccatagtgct

SEQ ID NO: 3314 - DNA, 25 bp, Artificial Sequence
  Probe
gctgcagcagtcaccactagggggt

SEQ ID NO: 3315 - DNA, 25 bp, Artificial Sequence
  Probe
cccagggccattaacaaccagtact

SEQ ID NO: 3316 - DNA, 25 bp, Artificial Sequence
  Probe
agtactccttcgtgtgagccaaccc

SEQ ID NO: 3317 - DNA, 25 bp, Artificial Sequence
  Probe
gcttcctgacccttgttggccaagg

SEQ ID NO: 3318 - DNA, 25 bp, Artificial Sequence
  Probe
cttcctgacccttgttggccaaggg

SEQ ID NO: 3319 - DNA, 25 bp, Artificial Sequence
  Probe
tcctgacccttgttggccaagggca

SEQ ID NO: 3320 - DNA, 25 bp, Artificial Sequence
  Probe
cccttgttggccaagggcatctttg

SEQ ID NO: 3321 - DNA, 25 bp, Artificial Sequence
  Probe
ttggccaagggcatctttgatggta

SEQ ID NO: 3322 - DNA, 25 bp, Artificial Sequence
  Probe
gccaagggcatctttgatggtacaa

SEQ ID NO: 3323 - DNA, 25 bp, Artificial Sequence
  Probe
atctttgatggtacaagcagaggct

SEQ ID NO: 3324 - DNA, 25 bp, Artificial Sequence
  Probe
tctttgatggtacaagcagaggctc

SEQ ID NO: 3325 - DNA, 25 bp, Artificial Sequence
  Probe
tttgatggtacaagcagaggctcgg

SEQ ID NO: 3326 - DNA, 25 bp, Artificial Sequence
  Probe
gagaggctcccgtcacacactacag

SEQ ID NO: 3327 - DNA, 25 bp, Artificial Sequence
  Probe
ggggatttgggctccatgagctcct

SEQ ID NO: 3328 - DNA, 25 bp, Artificial Sequence
  Probe
cttgaggggctcttctggtcagccc

SEQ ID NO: 3329 - DNA, 25 bp, Artificial Sequence
  Probe
gaggggctcttctggtcagccccac

SEQ ID NO: 3330 - DNA, 25 bp, Artificial Sequence
  Probe
cccatcctagggggctggtttggca

SEQ ID NO: 3331 - DNA, 25 bp, Artificial Sequence
  Probe
ggcaggggctgcacaaaacgcacaa

SEQ ID NO: 3332 - DNA, 25 bp, Artificial Sequence
  Probe
gacgtaatcacgtgctcgatgaaga

SEQ ID NO: 3333 - DNA, 25 bp, Artificial Sequence
  Probe
gcagatggccagtgtcacggtgaag

SEQ ID NO: 3334 - DNA, 25 bp, Artificial Sequence
  Probe
ttttcaccgtgacatttttagccat

SEQ ID NO: 3335 - DNA, 25 bp, Artificial Sequence
  Probe
gccatttgtccttgaggaagcccct

SEQ ID NO: 3336 - DNA, 25 bp, Artificial Sequence
  Probe
gatacggcctggccatcgaggacac

SEQ ID NO: 3337 - DNA, 25 bp, Artificial Sequence
  Probe
ccatccggcctctgtgtcaagaggt

SEQ ID NO: 3338 - DNA, 25 bp, Artificial Sequence
  Probe
cctcaccgtatttctactactactt

SEQ ID NO: 3339 - DNA, 25 bp, Artificial Sequence
  Probe
gaactttatagaatcctctctgtac

SEQ ID NO: 3340 - DNA, 25 bp, Artificial Sequence
  Probe
tggatgtgcggcagaggggtggctc

SEQ ID NO: 3341 - DNA, 25 bp, Artificial Sequence
  Probe
gtgtggaagacggactaagcctaga

SEQ ID NO: 3342 - DNA, 25 bp, Artificial Sequence
  Probe
ctagagaggccgcaaggggaccgcc

SEQ ID NO: 3343 - DNA, 25 bp, Artificial Sequence
  Probe
tgcagtagtgccaaaaggccccttc

SEQ ID NO: 3344 - DNA, 25 bp, Artificial Sequence
  Probe
tctgtagcctggtctgtgcattgtg

SEQ ID NO: 3345 - DNA, 25 bp, Artificial Sequence
  Probe
gtgcattgtggctgtcaaatccatg

SEQ ID NO: 3346 - DNA, 25 bp, Artificial Sequence
  Probe
cagccatggctggatgtgcatctgg

SEQ ID NO: 3347 - DNA, 25 bp, Artificial Sequence
  Probe
gctggatgtgcatctggcctatgac

SEQ ID NO: 3348 - DNA, 25 bp, Artificial Sequence
  Probe
tgcctgtgtttcatgttctgtgtca

SEQ ID NO: 3349 - DNA, 25 bp, Artificial Sequence
  Probe
tcatgttctgtgtcacgtgaccctg

SEQ ID NO: 3350 - DNA, 25 bp, Artificial Sequence
  Probe
cctggatgtggccatagtgtttgtc

SEQ ID NO: 3351 - DNA, 25 bp, Artificial Sequence
  Probe
gaagctgctcaacaaagtgtggaag

SEQ ID NO: 3352 - DNA, 25 bp, Artificial Sequence
  Probe
gttcttctcgtatgaattcttctgt

SEQ ID NO: 3353 - DNA, 25 bp, Artificial Sequence
  Probe
ttctgtaatgtcttccactgcatga

SEQ ID NO: 3354 - DNA, 25 bp, Artificial Sequence
  Probe
tcagtctccactgagaggtgccgtc

SEQ ID NO: 3355 - DNA, 25 bp, Artificial Sequence
  Probe
aagcggggtagcagccttgaaccca

SEQ ID NO: 3356 - DNA, 25 bp, Artificial Sequence
  Probe
gggacaccaccagaaggtccagggc

SEQ ID NO: 3357 - DNA, 25 bp, Artificial Sequence
  Probe
tccagggctctccccatgagagaat

SEQ ID NO: 3358 - DNA, 25 bp, Artificial Sequence
  Probe
ggacgtggtctatggtgagccaacg

SEQ ID NO: 3359 - DNA, 25 bp, Artificial Sequence
  Probe
aacagaacacactcctggtctggat

SEQ ID NO: 3360 - DNA, 25 bp, Artificial Sequence
  Probe
gatggggctgctgcttgagtgcaga

SEQ ID NO: 3361 - DNA, 25 bp, Artificial Sequence
  Probe
cagagggctgcggtaggccctttgc

SEQ ID NO: 3362 - DNA, 25 bp, Artificial Sequence
  Probe
ctttgcaggagtcaggtccctacac

SEQ ID NO: 3363 - DNA, 25 bp, Artificial Sequence
  Probe
gtctctgaagtatttcctccagttt

SEQ ID NO: 3364 - DNA, 25 bp, Artificial Sequence
  Probe
gggcccctatgtttgagtttgatgg

SEQ ID NO: 3365 - DNA, 25 bp, Artificial Sequence
  Probe
ggatcctcactcaacgaaaactcgg

SEQ ID NO: 3366 - DNA, 25 bp, Artificial Sequence
  Probe
ctcggttggaaactgttccgcctgg

SEQ ID NO: 3367 - DNA, 25 bp, Artificial Sequence
  Probe
gacttgctcatttagactgttcacg

SEQ ID NO: 3368 - DNA, 25 bp, Artificial Sequence
  Probe
gagtctgaatctgccaacgtggtgt

SEQ ID NO: 3369 - DNA, 25 bp, Artificial Sequence
  Probe
tcagggcaactttccccatacagga

SEQ ID NO: 3370 - DNA, 25 bp, Artificial Sequence
  Probe
tacatcaacagtctacgtcacagcc

SEQ ID NO: 3371 - DNA, 25 bp, Artificial Sequence
  Probe
gtgctttctagcaaacggttctgtt

SEQ ID NO: 3372 - DNA, 25 bp, Artificial Sequence
  Probe
tagcgagtcactgttgattctgctg

SEQ ID NO: 3373 - DNA, 25 bp, Artificial Sequence
  Probe
ataccgtgtaactaatcccgtggat

SEQ ID NO: 3374 - DNA, 25 bp, Artificial Sequence
  Probe
aaatcatctctgcgggcgtgaaagc

SEQ ID NO: 3375 - DNA, 25 bp, Artificial Sequence
  Probe
gtgcccgatgctttcggatgttgct

SEQ ID NO: 3376 - DNA, 25 bp, Artificial Sequence
  Probe
gaaaagtccaggtctcctgtgcttc

SEQ ID NO: 3377 - DNA, 25 bp, Artificial Sequence
  Probe
ttgttttcctgtgactttggtgtgt

SEQ ID NO: 3378 - DNA, 25 bp, Artificial Sequence
  Probe
gatctggttccatttttacgagagc

SEQ ID NO: 3379 - DNA, 25 bp, Artificial Sequence
  Probe
ttacgagagccaggaaccacgcacg

SEQ ID NO: 3380 - DNA, 25 bp, Artificial Sequence
  Probe
gaggtaaggtgattatccgttcccg

SEQ ID NO: 3381 - DNA, 25 bp, Artificial Sequence
  Probe
gcgaccgtgttctgggagtgtttga

SEQ ID NO: 3382 - DNA, 25 bp, Artificial Sequence
  Probe
tggtgaaaatttcctgtgtccgcaa

SEQ ID NO: 3383 - DNA, 25 bp, Artificial Sequence
  Probe
gtccgcaaggcccagaggagatcgt

SEQ ID NO: 3384 - DNA, 25 bp, Artificial Sequence
  Probe
aggagatcgtgtgatgtccgggggg

SEQ ID NO: 3385 - DNA, 25 bp, Artificial Sequence
  Probe
acagcctatggaggctccagtcatg

SEQ ID NO: 3386 - DNA, 25 bp, Artificial Sequence
  Probe
ggctccagtcatgctgtgggatgag

SEQ ID NO: 3387 - DNA, 25 bp, Artificial Sequence
  Probe
ctgtgggatgagtccagcttccctg

SEQ ID NO: 3388 - DNA, 25 bp, Artificial Sequence
  Probe
ttccctgacatcccaggggctgtaa

SEQ ID NO: 3389 - DNA, 25 bp, Artificial Sequence
  Probe
ggggctgtaagtgccaacatgactg

SEQ ID NO: 3390 - DNA, 25 bp, Artificial Sequence
  Probe
agcggagtaaggagcgctccctact

SEQ ID NO: 3391 - DNA, 25 bp, Artificial Sequence
  Probe
tccctactgcatggggacttccacg

SEQ ID NO: 3392 - DNA, 25 bp, Artificial Sequence
  Probe
actgggaccagaatgagcgttttct

SEQ ID NO: 3393 - DNA, 25 bp, Artificial Sequence
  Probe
gagcgttttctggtagtgcttaact

SEQ ID NO: 3394 - DNA, 25 bp, Artificial Sequence
  Probe
taactttggggatgtgggcctctcg

SEQ ID NO: 3395 - DNA, 25 bp, Artificial Sequence
  Probe
aactggagcctcacgaagggctgct

SEQ ID NO: 3396 - DNA, 25 bp, Artificial Sequence
  Probe
ggcaagaatcccaatttaactcatg

SEQ ID NO: 3397 - DNA, 25 bp, Artificial Sequence
  Probe
gtaagccttcagcctggcaagttac

SEQ ID NO: 3398 - DNA, 25 bp, Artificial Sequence
  Probe
acatgtagaaagcccacacttgtga

SEQ ID NO: 3399 - DNA, 25 bp, Artificial Sequence
  Probe
gttatttctacattgttctacagca

SEQ ID NO: 3400 - DNA, 25 bp, Artificial Sequence
  Probe
aaagtatccctttcaaatgcctttg

SEQ ID NO: 3401 - DNA, 25 bp, Artificial Sequence
  Probe
gcaacatgtctgtaccaagatggta

SEQ ID NO: 3402 - DNA, 25 bp, Artificial Sequence
  Probe
gtactttgccttaaccgtttatatg

SEQ ID NO: 3403 - DNA, 25 bp, Artificial Sequence
  Probe
cactttcatggagactgcaatacgt

SEQ ID NO: 3404 - DNA, 25 bp, Artificial Sequence
  Probe
tgctatgagcactttctttatcctt

SEQ ID NO: 3405 - DNA, 25 bp, Artificial Sequence
  Probe
atccttggagtttaatcctttgctt

SEQ ID NO: 3406 - DNA, 25 bp, Artificial Sequence
  Probe
ttgcttcatctttctacagtatgac

SEQ ID NO: 3407 - DNA, 25 bp, Artificial Sequence
  Probe
ggcctctccatagttatcggggatc

SEQ ID NO: 3408 - DNA, 25 bp, Artificial Sequence
  Probe
tagttatcggggatctgctccggca

SEQ ID NO: 3409 - DNA, 25 bp, Artificial Sequence
  Probe
tttcctgtacatgggagtcacctcc

SEQ ID NO: 3410 - DNA, 25 bp, Artificial Sequence
  Probe
tcacctcccttaacgggatccagtt

SEQ ID NO: 3411 - DNA, 25 bp, Artificial Sequence
  Probe
agttctatgagcggctgcatctgct

SEQ ID NO: 3412 - DNA, 25 bp, Artificial Sequence
  Probe
cacccagatgtcacttacgtcaaga

SEQ ID NO: 3413 - DNA, 25 bp, Artificial Sequence
  Probe
cgtatcttcaccgaccgagagatga

SEQ ID NO: 3414 - DNA, 25 bp, Artificial Sequence
  Probe
gaggcagagccggtgtttgatgagc

SEQ ID NO: 3415 - DNA, 25 bp, Artificial Sequence
  Probe
acaatgagatgcccatgcctgtgta

SEQ ID NO: 3416 - DNA, 25 bp, Artificial Sequence
  Probe
acagccgagggaccgatggacgagg

SEQ ID NO: 3417 - DNA, 25 bp, Artificial Sequence
  Probe
ggacgaggggacaggctggtgggat

SEQ ID NO: 3418 - DNA, 25 bp, Artificial Sequence
  probe
agagaactatgttcttccctgactt

SEQ ID NO: 3419 - DNA, 25 bp, Artificial Sequence
  probe
ggaaggtgaatgtgttcccgtcctc

SEQ ID NO: 3420 - DNA, 25 bp, Artificial Sequence
  probe
ccgtcctcccgcagtcagaaaggag

SEQ ID NO: 3421 - DNA, 25 bp, Artificial Sequence
  probe
tcatgggaccaggcgagagggcacc

SEQ ID NO: 3422 - DNA, 25 bp, Artificial Sequence
  probe
gataaatgggtccagggctgatcaa

SEQ ID NO: 3423 - DNA, 25 bp, Artificial Sequence
  probe
ctgccgctctcagtggacagggcat

SEQ ID NO: 3424 - DNA, 25 bp, Artificial Sequence
  probe
catctgttatcctgaaccttggcag

SEQ ID NO: 3425 - DNA, 25 bp, Artificial Sequence
  probe
accttggcagacacgtcttgttttc

SEQ ID NO: 3426 - DNA, 25 bp, Artificial Sequence
  probe
tggcctcagccttaaacttttgttc

SEQ ID NO: 3427 - DNA, 25 bp, Artificial Sequence
  probe
gcagcacggggagggtttggctacc

SEQ ID NO: 3428 - DNA, 25 bp, Artificial Sequence
  probe
agccaggtaccaccattgtaaggaa

SEQ ID NO: 3429 - DNA, 25 bp, Artificial Sequence
  probe
taatttcggggatttctgtggtagg

SEQ ID NO: 3430 - DNA, 25 bp, Artificial Sequence
  probe
ccatggactcctggaaggcacagag

SEQ ID NO: 3431 - DNA, 25 bp, Artificial Sequence
  probe
agcacttaagcacctccatattatg

SEQ ID NO: 3432 - DNA, 25 bp, Artificial Sequence
  probe
aagcacctccatattatgacttggt

SEQ ID NO: 3433 - DNA, 25 bp, Artificial Sequence
  probe
tatgacttggtgggtcaccccttag

SEQ ID NO: 3434 - DNA, 25 bp, Artificial Sequence
  probe
ccctctcccaccaagactatgagaa

SEQ ID NO: 3435 - DNA, 25 bp, Artificial Sequence
  probe
gactatgagaacttcagctgatagc

SEQ ID NO: 3436 - DNA, 25 bp, Artificial Sequence
  probe
gggctccccagatgaggatgcaggg

SEQ ID NO: 3437 - DNA, 25 bp, Artificial Sequence
  probe
cttctcccctgtgacgggaaggcag

SEQ ID NO: 3438 - DNA, 25 bp, Artificial Sequence
  probe
cgggaaggcaggtgtgactccaggc

SEQ ID NO: 3439 - DNA, 25 bp, Artificial Sequence
  probe
cctttcttctgttcaaagttttctg

SEQ ID NO: 3440 - DNA, 25 bp, Artificial Sequence
  probe
ttccctctatccttttatttaatgc

SEQ ID NO: 3441 - DNA, 25 bp, Artificial Sequence
  probe
atattacaaaatccgttctaccata

SEQ ID NO: 3442 - DNA, 25 bp, Artificial Sequence
  probe
aatccgttctaccataacaatacag

SEQ ID NO: 3443 - DNA, 25 bp, Artificial Sequence
  probe
gtgttactgcaccagtgttataggt

SEQ ID NO: 3444 - DNA, 25 bp, Artificial Sequence
  probe
agaatgtttacttcctgcaaactgg

SEQ ID NO: 3445 - DNA, 25 bp, Artificial Sequence
  probe
aagcaatccagatgtggtttactct

SEQ ID NO: 3446 - DNA, 25 bp, Artificial Sequence
  probe
ggtttactctgccacagtctaatgt

SEQ ID NO: 3447 - DNA, 25 bp, Artificial Sequence
  probe
gccacagtctaatgtcattcacttc

SEQ ID NO: 3448 - DNA, 25 bp, Artificial Sequence
  probe
gtcattcacttcatttgatggggtc

SEQ ID NO: 3449 - DNA, 25 bp, Artificial Sequence
  probe
tgatggggtcacttgttagctgtca

SEQ ID NO: 3450 - DNA, 25 bp, Artificial Sequence
  probe
gatgtatctaaatgtcccgagaggg

SEQ ID NO: 3451 - DNA, 25 bp, Artificial Sequence
  probe
cctccaggtctccataaattgtctt

SEQ ID NO: 3452 - DNA, 25 bp, Artificial Sequence
  probe
tggagccacaaggagtgtcccttct

SEQ ID NO: 3453 - DNA, 25 bp, Artificial Sequence
  probe
ccccagcagagccgtgggagggtcc

SEQ ID NO: 3454 - DNA, 25 bp, Artificial Sequence
  probe
tctgctctcctttgaaccttggcag

SEQ ID NO: 3455 - DNA, 25 bp, Artificial Sequence
  probe
tcctgtgaaatgttaatctccgtga

SEQ ID NO: 3456 - DNA, 25 bp, Artificial Sequence
  probe
taatctccgtgagttcttcctggtt

SEQ ID NO: 3457 - DNA, 25 bp, Artificial Sequence
  probe
ggggtgattgtgatggtggttggga

SEQ ID NO: 3458 - DNA, 25 bp, Artificial Sequence
  probe
tggaattagttggtccctactgtcc

SEQ ID NO: 3459 - DNA, 25 bp, Artificial Sequence
  probe
tactgtcccccatgaggttgtgaac

SEQ ID NO: 3460 - DNA, 25 bp, Artificial Sequence
  probe
tcccccatgaggttgtgaacccctc

SEQ ID NO: 3461 - DNA, 25 bp, Artificial Sequence
  probe
ctgtacagcaagagcaactttttct

SEQ ID NO: 3462 - DNA, 25 bp, Artificial Sequence
  probe
cacggggccatgtacaacgggatcg

SEQ ID NO: 3463 - DNA, 25 bp, Artificial Sequence
  probe
gtgagcggcctgactacaagggaga

SEQ ID NO: 3464 - DNA, 25 bp, Artificial Sequence
  probe
tggtgaagcggcctaatcctgacat

SEQ ID NO: 3465 - DNA, 25 bp, Artificial Sequence
  probe
tcgagctgcgatgcctcgagctgga

SEQ ID NO: 3466 - DNA, 25 bp, Artificial Sequence
  probe
gacctttcgactcatgttgctggag

SEQ ID NO: 3467 - DNA, 25 bp, Artificial Sequence
  probe
gtcacggagactcaccagttggcag

SEQ ID NO: 3468 - DNA, 25 bp, Artificial Sequence
  probe
aagaatgaaagactccgtgctgcct

SEQ ID NO: 3469 - DNA, 25 bp, Artificial Sequence
  probe
tccgtgctgcctttggcatcagtga

SEQ ID NO: 3470 - DNA, 25 bp, Artificial Sequence
  probe
gattcttacgtagatggcagctctt

SEQ ID NO: 3471 - DNA, 25 bp, Artificial Sequence
  probe
tcagcgtcgtgcccgagaagctaaa

SEQ ID NO: 3472 - DNA, 25 bp, Artificial Sequence
  probe
gaagctaaacaaccagctcctgagc

SEQ ID NO: 3473 - DNA, 25 bp, Artificial Sequence
  probe
gaagaggatccacaactccttggag

SEQ ID NO: 3474 - DNA, 25 bp, Artificial Sequence
  probe
gcctgtccaagggctcaagactttc

SEQ ID NO: 3475 - DNA, 25 bp, Artificial Sequence
  probe
caagactttctaactgggatgtggt

SEQ ID NO: 3476 - DNA, 25 bp, Artificial Sequence
  probe
tacctttgggggcaacagcacccta

SEQ ID NO: 3477 - DNA, 25 bp, Artificial Sequence
  probe
ttcctggaaccagccaggccaggca

SEQ ID NO: 3478 - DNA, 25 bp, Artificial Sequence
  probe
gccccagccgcgggaggctggaagg

SEQ ID NO: 3479 - DNA, 25 bp, Artificial Sequence
  probe
aggctggaagggctggcagatcgct

SEQ ID NO: 3480 - DNA, 25 bp, Artificial Sequence
  probe
tgacaccacgccagatcacagggca

SEQ ID NO: 3481 - DNA, 25 bp, Artificial Sequence
  probe
ggcaccaggccagagatagtcttct

SEQ ID NO: 3482 - DNA, 25 bp, Artificial Sequence
  probe
tggcctctggctagtcagtttttca

SEQ ID NO: 3483 - DNA, 25 bp, Artificial Sequence
  probe
agccttacagtatctggctttgtac

SEQ ID NO: 3484 - DNA, 25 bp, Artificial Sequence
  probe
aattctgaactgtatccatatttta

SEQ ID NO: 3485 - DNA, 25 bp, Artificial Sequence
  probe
gaactttatcagtatgctttgttga

SEQ ID NO: 3486 - DNA, 25 bp, Artificial Sequence
  probe
taattgagttcaattcgcctctccg

SEQ ID NO: 3487 - DNA, 25 bp, Artificial Sequence
  probe
cctctccgcattgcctattgataca

SEQ ID NO: 3488 - DNA, 25 bp, Artificial Sequence
  probe
gcattgcctattgatacactttact

SEQ ID NO: 3489 - DNA, 25 bp, Artificial Sequence
  probe
aaaacattttcctgcttgtcttaga

SEQ ID NO: 3490 - DNA, 25 bp, Artificial Sequence
  probe
gcgttaagtcggtaagctagaggat

SEQ ID NO: 3491 - DNA, 25 bp, Artificial Sequence
  probe
atgtcctctagataaaacacccgat

SEQ ID NO: 3492 - DNA, 25 bp, Artificial Sequence
  probe
gacacattggagagcttagaggata

SEQ ID NO: 3493 - DNA, 25 bp, Artificial Sequence
  probe
atcacacacaaaagttacaccaaca

SEQ ID NO: 3494 - DNA, 25 bp, Artificial Sequence
  probe
acctgtaaaataccttgtgccctat

SEQ ID NO: 3495 - DNA, 25 bp, Artificial Sequence
  probe
gctcctccctgctagtcagggacac

SEQ ID NO: 3496 - DNA, 25 bp, Artificial Sequence
  probe
ggatcattgtctgcttagtggccta

SEQ ID NO: 3497 - DNA, 25 bp, Artificial Sequence
  probe
tggcttgtttatgctttgtgtctca

SEQ ID NO: 3498 - DNA, 25 bp, Artificial Sequence
  probe
ttcgcagctcacacagtttacctgt

SEQ ID NO: 3499 - DNA, 25 bp, Artificial Sequence
  probe
ttacctgtgagaccacactcgactc

SEQ ID NO: 3500 - DNA, 25 bp, Artificial Sequence
  probe
cactcgactcttgccagtgcaaact

SEQ ID NO: 3501 - DNA, 25 bp, Artificial Sequence
  probe
tcagcaggacctttgtttaccggga

SEQ ID NO: 3502 - DNA, 25 bp, Artificial Sequence
  probe
cgggatgtgacggactgtaccagcg

SEQ ID NO: 3503 - DNA, 25 bp, Artificial Sequence
  probe
cttgttggcctgctttgtgatgtgg

SEQ ID NO: 3504 - DNA, 25 bp, Artificial Sequence
  probe
gtaccaggtcttctatgtgggtgtc

SEQ ID NO: 3505 - DNA, 25 bp, Artificial Sequence
  probe
gtgggtgtcaggatatgctccctca

SEQ ID NO: 3506 - DNA, 25 bp, Artificial Sequence
  probe
ctcaaatgattattatccccttcaa

SEQ ID NO: 3507 - DNA, 25 bp, Artificial Sequence
  probe
actggtctgtactttggtgttgtgg

SEQ ID NO: 3508 - DNA, 25 bp, Artificial Sequence
  probe
atgttttctattcatgtccagggca

SEQ ID NO: 3509 - DNA, 25 bp, Artificial Sequence
  probe
acttccctttttgcatgcagtatgt

SEQ ID NO: 3510 - DNA, 25 bp, Artificial Sequence
  probe
aaaagctgccctgcaaaaccaatcc

SEQ ID NO: 3511 - DNA, 25 bp, Artificial Sequence
  probe
caaaaccaatcctttcctatcatga

SEQ ID NO: 3512 - DNA, 25 bp, Artificial Sequence
  probe
gaagagtaccttcatattttctaga

SEQ ID NO: 3513 - DNA, 25 bp, Artificial Sequence
  probe
gtctctgaaccgttgctacatagcc

SEQ ID NO: 3514 - DNA, 25 bp, Artificial Sequence
  probe
gttggctatcagttcttgctattct

SEQ ID NO: 3515 - DNA, 25 bp, Artificial Sequence
  probe
gttcttgctattctcagagcactct

SEQ ID NO: 3516 - DNA, 25 bp, Artificial Sequence
  probe
agagcactctatcatgtttttaggt

SEQ ID NO: 3517 - DNA, 25 bp, Artificial Sequence
  probe
ctatgggaatctgtgtccttgcctc

SEQ ID NO: 3518 - DNA, 25 bp, Artificial Sequence
  probe
agagccaaagcaaacctgtcatttt

SEQ ID NO: 3519 - DNA, 25 bp, Artificial Sequence
  probe
acctgtcatttttgatagcttctga

SEQ ID NO: 3520 - DNA, 25 bp, Artificial Sequence
  probe
gaaataataagcccctgtacctgtt

SEQ ID NO: 3521 - DNA, 25 bp, Artificial Sequence
  probe
gtacctgttatttttgggctctggg

SEQ ID NO: 3522 - DNA, 25 bp, Artificial Sequence
  probe
ggctctgggggttgggtggatggcc

SEQ ID NO: 3523 - DNA, 25 bp, Artificial Sequence
  probe
aataggttcattccagtgtatctta

SEQ ID NO: 3524 - DNA, 25 bp, Artificial Sequence
  probe
taatagtgtttcaagctgctgttaa

SEQ ID NO: 3525 - DNA, 25 bp, Artificial Sequence
  probe
tgctctgggagtcagtccattaaat

SEQ ID NO: 3526 - DNA, 25 bp, Artificial Sequence
  probe
gggcaagaatcagtcttctcttatt

SEQ ID NO: 3527 - DNA, 25 bp, Artificial Sequence
  probe
gatgttatccaggaatgtgcagcca

SEQ ID NO: 3528 - DNA, 25 bp, Artificial Sequence
  probe
tgccagtatgacccacttggactca

SEQ ID NO: 3529 - DNA, 25 bp, Artificial Sequence
  probe
ccctggctgctcttatggagccgag

SEQ ID NO: 3530 - DNA, 25 bp, Artificial Sequence
  probe
ggctgctcttatggagccgagatcc

SEQ ID NO: 3531 - DNA, 25 bp, Artificial Sequence
  probe
gccgagatccagtcagggtgggggc

SEQ ID NO: 3532 - DNA, 25 bp, Artificial Sequence
  probe
ccagtcagggtgggggcgctggagc

SEQ ID NO: 3533 - DNA, 25 bp, Artificial Sequence
  probe
tgccagcaccaagagattatttaat

SEQ ID NO: 3534 - DNA, 25 bp, Artificial Sequence
  probe
aggccagtagagaattctgcccact

SEQ ID NO: 3535 - DNA, 25 bp, Artificial Sequence
  probe
accaaggcctagacacggcactggc

SEQ ID NO: 3536 - DNA, 25 bp, Artificial Sequence
  probe
gggaagagcactggtgtgggggttc

SEQ ID NO: 3537 - DNA, 25 bp, Artificial Sequence
  probe
tggtgtgggggttccaccgagaagg

SEQ ID NO: 3538 - DNA, 25 bp, Artificial Sequence
  probe
caccgagaaggggacctcatctaga

SEQ ID NO: 3539 - DNA, 25 bp, Artificial Sequence
  probe
tctaacaggtgctcaacctactcca

SEQ ID NO: 3540 - DNA, 25 bp, Artificial Sequence
  probe
ccaccacactcccgagtgtcttgga

SEQ ID NO: 3541 - DNA, 25 bp, Artificial Sequence
  probe
gtcttggagggacagcatccttttt

SEQ ID NO: 3542 - DNA, 25 bp, Artificial Sequence
  probe
tcacctcgctcgcaagtatcaagaa

SEQ ID NO: 3543 - DNA, 25 bp, Artificial Sequence
  probe
ggtggccatacctggtttgtgaatg

SEQ ID NO: 3544 - DNA, 25 bp, Artificial Sequence
  probe
ttgtgagtttcacccagtctgggga

SEQ ID NO: 3545 - DNA, 25 bp, Artificial Sequence
  probe
gtctggggagtctgtgaagcatatg

SEQ ID NO: 3546 - DNA, 25 bp, Artificial Sequence
  probe
acagacacactttttgtccctgcat

SEQ ID NO: 3547 - DNA, 25 bp, Artificial Sequence
  probe
gcatgtctacagaatttctcctcct

SEQ ID NO: 3548 - DNA, 25 bp, Artificial Sequence
  probe
caaacaaaggacaccaaccacactc

SEQ ID NO: 3549 - DNA, 25 bp, Artificial Sequence
  probe
cactccccagactaagccgagatag

SEQ ID NO: 3550 - DNA, 25 bp, Artificial Sequence
  probe
caaggtgcatcggcagacgctgaac

SEQ ID NO: 3551 - DNA, 25 bp, Artificial Sequence
  probe
tgaaccctcactttggggagacctt

SEQ ID NO: 3552 - DNA, 25 bp, Artificial Sequence
  probe
gtcatggcggtgtacgacttcgacc

SEQ ID NO: 3553 - DNA, 25 bp, Artificial Sequence
  probe
gtcatggcggtgtacgacttcgacc

SEQ ID NO: 3554 - DNA, 25 bp, Artificial Sequence
  probe
ccgtcatcgtcctggaggctaaaaa

SEQ ID NO: 3555 - DNA, 25 bp, Artificial Sequence
  probe
cagatccatacgtcaaggtccacct

SEQ ID NO: 3556 - DNA, 25 bp, Artificial Sequence
  probe
aagaagaacactctgaacccctatt

SEQ ID NO: 3557 - DNA, 25 bp, Artificial Sequence
  probe
acccctattacaacgaagctttcag

SEQ ID NO: 3558 - DNA, 25 bp, Artificial Sequence
  probe
gaagctttcagcttcgaggtgccct

SEQ ID NO: 3559 - DNA, 25 bp, Artificial Sequence
  probe
ctcggacccctatgtgcgggtctac

SEQ ID NO: 3560 - DNA, 25 bp, Artificial Sequence
  probe
ggaggcggtacgagaccaaggtgca

SEQ ID NO: 3561 - DNA, 25 bp, Artificial Sequence
  probe
cctgtgaccaagtccagaaggtgca

SEQ ID NO: 3562 - DNA, 25 bp, Artificial Sequence
  probe
aaggtgcaggtggagctgaccgtgc

SEQ ID NO: 3563 - DNA, 25 bp, Artificial Sequence
  probe
ctgaccgtgctggactacgacaagc

SEQ ID NO: 3564 - DNA, 25 bp, Artificial Sequence
  probe
ctggactacgacaagctgggcaaga

SEQ ID NO: 3565 - DNA, 25 bp, Artificial Sequence
  probe
gctgggcaagaacgaggccatcggg

SEQ ID NO: 3566 - DNA, 25 bp, Artificial Sequence
  probe
aagaacgaggccatcgggagggtgg

SEQ ID NO: 3567 - DNA, 25 bp, Artificial Sequence
  probe
ggccatcgggagggtggccgtgggg

SEQ ID NO: 3568 - DNA, 25 bp, Artificial Sequence
  probe
cccaacgatgccaatcacgacaact

SEQ ID NO: 3569 - DNA, 25 bp, Artificial Sequence
  probe
tgccaatcacgacaactttccagca

SEQ ID NO: 3570 - DNA, 25 bp, Artificial Sequence
  probe
gaccccgggaagggaaggcagcctg

SEQ ID NO: 3571 - DNA, 25 bp, Artificial Sequence
  probe
aagggaaggcagcctggtttctcct

SEQ ID NO: 3572 - DNA, 25 bp, Artificial Sequence
  probe
acctaacccaatattgctttcctga

SEQ ID NO: 3573 - DNA, 25 bp, Artificial Sequence
  probe
ttgctttcctgagaaatctctgctc

SEQ ID NO: 3574 - DNA, 25 bp, Artificial Sequence
  probe
ggaattccagcaaatctgatccaac

SEQ ID NO: 3575 - DNA, 25 bp, Artificial Sequence
  probe
gtgtggaaattcctcaacagggcat

SEQ ID NO: 3576 - DNA, 25 bp, Artificial Sequence
  probe
caacagggcattatccgctccctga

SEQ ID NO: 3577 - DNA, 25 bp, Artificial Sequence
  probe
cgctccctgaatgtccatgtgagtg

SEQ ID NO: 3578 - DNA, 25 bp, Artificial Sequence
  probe
gtccatgtgagtggagccctgctga

SEQ ID NO: 3579 - DNA, 25 bp, Artificial Sequence
  probe
gagccctgctgatctgggagtacac

SEQ ID NO: 3580 - DNA, 25 bp, Artificial Sequence
  probe
atctgggagtacaccaggcagcagc

SEQ ID NO: 3581 - DNA, 25 bp, Artificial Sequence
  probe
ctcgcacggagataccaagccatga

SEQ ID NO: 3582 - DNA, 25 bp, Artificial Sequence
  probe
tgatgtgccttccttagtgaactgc

SEQ ID NO: 3583 - DNA, 25 bp, Artificial Sequence
  probe
agagatttgggagtctgcctggttg

SEQ ID NO: 3584 - DNA, 25 bp, Artificial Sequence
  probe
ttttggggcttgtgcttggcagttc

SEQ ID NO: 3585 - DNA, 25 bp, Artificial Sequence
  probe
atcctgagaccctggctgagaactt

SEQ ID NO: 3586 - DNA, 25 bp, Artificial Sequence
  probe
tgctgcttaaaggcaccatggggac

SEQ ID NO: 3587 - DNA, 25 bp, Artificial Sequence
  probe
cctcagacccaagccattgttagca

SEQ ID NO: 3588 - DNA, 25 bp, Artificial Sequence
  probe
gagacacaaagaccagagccagcct

SEQ ID NO: 3589 - DNA, 25 bp, Artificial Sequence
  probe
gccagcctcagggacaagagattcc

SEQ ID NO: 3590 - DNA, 25 bp, Artificial Sequence
  probe
agagattccagttttaggcctttct

SEQ ID NO: 3591 - DNA, 25 bp, Artificial Sequence
  probe
gctggagccagtgtcctggtttgac

SEQ ID NO: 3592 - DNA, 25 bp, Artificial Sequence
  probe
cacccacgctgggggctgtaatcac

SEQ ID NO: 3593 - DNA, 25 bp, Artificial Sequence
  probe
atcacggagggaagtggctgccccc

SEQ ID NO: 3594 - DNA, 25 bp, Artificial Sequence
  probe
tgacaggatgggtcctctcatacag

SEQ ID NO: 3595 - DNA, 25 bp, Artificial Sequence
  probe
tttttccatctggcgtttctgtgtc

SEQ ID NO: 3596 - DNA, 25 bp, Artificial Sequence
  probe
gtttctgtgtcctccaggtttatat

SEQ ID NO: 3597 - DNA, 25 bp, Artificial Sequence
  probe
gggagagttccatgggcagatttcc

SEQ ID NO: 3598 - DNA, 25 bp, Artificial Sequence
  probe
gaaggccaaaacggagaactgctct

SEQ ID NO: 3599 - DNA, 25 bp, Artificial Sequence
  probe
agaccaaaagtttgctcagcatcac

SEQ ID NO: 3600 - DNA, 25 bp, Artificial Sequence
  probe
tcagcatcacactacatctcaaaat

SEQ ID NO: 3601 - DNA, 25 bp, Artificial Sequence
  probe
tagtttacaaggttgggggctctct

SEQ ID NO: 3602 - DNA, 25 bp, Artificial Sequence
  probe
gggctctctttgcttcgagaagtaa

SEQ ID NO: 3603 - DNA, 25 bp, Artificial Sequence
  probe
gctgcattcaacgtcaaaattacct

SEQ ID NO: 3604 - DNA, 25 bp, Artificial Sequence
  probe
gcaccttgcctgaacatgactttaa

SEQ ID NO: 3605 - DNA, 25 bp, Artificial Sequence
  probe
ggcggcgccagcgggaattaaatcg

SEQ ID NO: 3606 - DNA, 25 bp, Artificial Sequence
  probe
aaagtaccaggcactaggtcggcgc

SEQ ID NO: 3607 - DNA, 25 bp, Artificial Sequence
  probe
gcgctgccgggagatcgagcaggtg

SEQ ID NO: 3608 - DNA, 25 bp, Artificial Sequence
  probe
aacgagcgggtcctgaacaggctcc

SEQ ID NO: 3609 - DNA, 25 bp, Artificial Sequence
  probe
ggttcctcatgagagtgctggactc

SEQ ID NO: 3610 - DNA, 25 bp, Artificial Sequence
  probe
gctggactcctacggggatgactac

SEQ ID NO: 3611 - DNA, 25 bp, Artificial Sequence
  probe
cagccagttcaccattgtgctggag

SEQ ID NO: 3612 - DNA, 25 bp, Artificial Sequence
  probe
gccgagcaggaaatgcgctgactcc

SEQ ID NO: 3613 - DNA, 25 bp, Artificial Sequence
  probe
tggccccggtgcagattaaggttga

SEQ ID NO: 3614 - DNA, 25 bp, Artificial Sequence
  probe
cctggattccagttgggtttctcgg

SEQ ID NO: 3615 - DNA, 25 bp, Artificial Sequence
  probe
tcggggtccagacaaactgctgccc

SEQ ID NO: 3616 - DNA, 25 bp, Artificial Sequence
  probe
tcgcccatctgttgctgtgggagtg

SEQ ID NO: 3617 - DNA, 25 bp, Artificial Sequence
  probe
gtgggagtgtgaacggatcgctgaa

SEQ ID NO: 3618 - DNA, 25 bp, Artificial Sequence
  probe
gctttgctctctctaggtgggcaag

SEQ ID NO: 3619 - DNA, 25 bp, Artificial Sequence
  probe
ccgtgtgccccagggggatcaggga

SEQ ID NO: 3620 - DNA, 25 bp, Artificial Sequence
  probe
gaacatggcttcatccaggttaact

SEQ ID NO: 3621 - DNA, 25 bp, Artificial Sequence
  probe
atccaggttaactgatgctgccatt

SEQ ID NO: 3622 - DNA, 25 bp, Artificial Sequence
  probe
ggatgcctgtagtagggaactctgg

SEQ ID NO: 3623 - DNA, 25 bp, Artificial Sequence
  probe
tgggctgaggtgggattttccctcc

SEQ ID NO: 3624 - DNA, 25 bp, Artificial Sequence
  probe
gtgagggagccatgctgctgaattc

SEQ ID NO: 3625 - DNA, 25 bp, Artificial Sequence
  probe
ctggttggcatttccccattatgta

SEQ ID NO: 3626 - DNA, 25 bp, Artificial Sequence
  probe
gtgttgggtagggcagactctgctt

SEQ ID NO: 3627 - DNA, 25 bp, Artificial Sequence
  probe
gcctccgctcagtgatgagaccaag

SEQ ID NO: 3628 - DNA, 25 bp, Artificial Sequence
  probe
gagatcggagacaagcatggtgctg

SEQ ID NO: 3629 - DNA, 25 bp, Artificial Sequence
  probe
gctgggctcaggaaagctgccaaat

SEQ ID NO: 3630 - DNA, 25 bp, Artificial Sequence
  probe
ttcagtcctatgttgggtccaagct

SEQ ID NO: 3631 - DNA, 25 bp, Artificial Sequence
  probe
ctgtgctgtttctgtcaagccaggt

SEQ ID NO: 3632 - DNA, 25 bp, Artificial Sequence
  probe
ggacattccaagttcatatgcgtga

SEQ ID NO: 3633 - DNA, 25 bp, Artificial Sequence
  probe
ggatgtaacagaaccgactccagtt

SEQ ID NO: 3634 - DNA, 25 bp, Artificial Sequence
  probe
gctgtggtttgcattcacggcagta

SEQ ID NO: 3635 - DNA, 25 bp, Artificial Sequence
  probe
cacggcagtagttagcccaggtgtg

SEQ ID NO: 3636 - DNA, 25 bp, Artificial Sequence
  probe
gagtgcactgcatgatagcgttctg

SEQ ID NO: 3637 - DNA, 25 bp, Artificial Sequence
  probe
ggaccagctaagtctctgcagtagt

SEQ ID NO: 3638 - DNA, 25 bp, Artificial Sequence
  probe
acaccagcaattatgactttgtcta

SEQ ID NO: 3639 - DNA, 25 bp, Artificial Sequence
  probe
gaggcttcagaaccactgaacttga

SEQ ID NO: 3640 - DNA, 25 bp, Artificial Sequence
  probe
tgaacttgaaacttaccctctaggg

SEQ ID NO: 3641 - DNA, 25 bp, Artificial Sequence
  probe
gggatgcaggtgggatgtccaggga

SEQ ID NO: 3642 - DNA, 25 bp, Artificial Sequence
  probe
ggttggtcagcagtcagacaactct

SEQ ID NO: 3643 - DNA, 25 bp, Artificial Sequence
  probe
tggggactggtaaatctgtgcctct

SEQ ID NO: 3644 - DNA, 25 bp, Artificial Sequence
  probe
gcctcctaggacttattttcccagg

SEQ ID NO: 3645 - DNA, 25 bp, Artificial Sequence
  probe
attttcccaggaggccatttacaag

SEQ ID NO: 3646 - DNA, 50 bp, Artificial Sequence
  probe
aaggggatctggatgacctgctgatattttcccaggaggccatttacaag

SEQ ID NO: 3647 - DNA, 25 bp, Artificial Sequence
  probe
gatccagcttgccagggacttaggt

SEQ ID NO: 3648 - DNA, 25 bp, Artificial Sequence
  probe
cctgttttgtttgctactggttaca

SEQ ID NO: 3649 - DNA, 25 bp, Artificial Sequence
  probe
aaaagcccagatttcggtagccatc

SEQ ID NO: 3650 - DNA, 25 bp, Artificial Sequence
  probe
tttctgctttcttagtgcccattat

SEQ ID NO: 3651 - DNA, 25 bp, Artificial Sequence
  probe
ttttttcttggcctgtgtacgggat

SEQ ID NO: 3652 - DNA, 25 bp, Artificial Sequence
  probe
tgtgtacgggattgcctcatttcct

SEQ ID NO: 3653 - DNA, 25 bp, Artificial Sequence
  probe
cctcatttcctgctctgaattttaa

SEQ ID NO: 3654 - DNA, 25 bp, Artificial Sequence
  probe
aaagctgtcatatggtttcctcaca

SEQ ID NO: 3655 - DNA, 25 bp, Artificial Sequence
  probe
tagtttgccgttttactttcatcca

SEQ ID NO: 3656 - DNA, 25 bp, Artificial Sequence
  probe
aaggaaattgtgcctcttgcagcct

SEQ ID NO: 3657 - DNA, 25 bp, Artificial Sequence
  probe
ttagtactatcgattctttccaccc

SEQ ID NO: 3658 - DNA, 25 bp, Artificial Sequence
  probe
gacttgcggttctctctgtagaaaa

SEQ ID NO: 3659 - DNA, 25 bp, Artificial Sequence
  probe
gagtcagttcagttccgtaaaggta

SEQ ID NO: 3660 - DNA, 25 bp, Artificial Sequence
  probe
taatcagtccagttccctgaggttt

SEQ ID NO: 3661 - DNA, 25 bp, Artificial Sequence
  probe
tactctgcttttcgactcattcagg

SEQ ID NO: 3662 - DNA, 25 bp, Artificial Sequence
  probe
gtagcattgtacctgaacctgattg

SEQ ID NO: 3663 - DNA, 25 bp, Artificial Sequence
  probe
tgggagggtgtctgttatccctttc

SEQ ID NO: 3664 - DNA, 25 bp, Artificial Sequence
  probe
ctttgtccccgttgttagactggca

SEQ ID NO: 3665 - DNA, 25 bp, Artificial Sequence
  probe
tagactggcagcgtcagttgctcgg

SEQ ID NO: 3666 - DNA, 25 bp, Artificial Sequence
  probe
gccgtgggtgaggcaggtggctggc

SEQ ID NO: 3667 - DNA, 25 bp, Artificial Sequence
  probe
tggcatttactgctctgacacttcc

SEQ ID NO: 3668 - DNA, 25 bp, Artificial Sequence
  probe
ctgtggggcctgtgaactgcacagc

SEQ ID NO: 3669 - DNA, 25 bp, Artificial Sequence
  probe
cagccaggagcaaggaacccactaa

SEQ ID NO: 3670 - DNA, 25 bp, Artificial Sequence
  probe
catgtcccctctacagtgttaaatt

SEQ ID NO: 3671 - DNA, 25 bp, Artificial Sequence
  probe
gcaactgccacataattgccaaaac

SEQ ID NO: 3672 - DNA, 25 bp, Artificial Sequence
  probe
aaatgagccatcacgtcacaaagag

SEQ ID NO: 3673 - DNA, 25 bp, Artificial Sequence
  probe
ggcggtgaaactactctgtgtgata

SEQ ID NO: 3674 - DNA, 25 bp, Artificial Sequence
  probe
tacactggcggatgcatgtcactgt

SEQ ID NO: 3675 - DNA, 25 bp, Artificial Sequence
  probe
gcacttgtccagacccacagaatgt

SEQ ID NO: 3676 - DNA, 25 bp, Artificial Sequence
  probe
gacccacagaatgtgcactccgaag

SEQ ID NO: 3677 - DNA, 25 bp, Artificial Sequence
  probe
actccgaagtgtgaaccctcgtatg

SEQ ID NO: 3678 - DNA, 25 bp, Artificial Sequence
  probe
gaaccctcgtatggactatgaactc

SEQ ID NO: 3679 - DNA, 25 bp, Artificial Sequence
  probe
gacatgtccgtgtagggtcatcagt

SEQ ID NO: 3680 - DNA, 25 bp, Artificial Sequence
  probe
agggtcatcagttacacatgtacca

SEQ ID NO: 3681 - DNA, 25 bp, Artificial Sequence
  probe
tggtagtaagggaccctgtgcctgt

SEQ ID NO: 3682 - DNA, 25 bp, Artificial Sequence
  probe
ttgtttttgacatcagctgtaatca

SEQ ID NO: 3683 - DNA, 25 bp, Artificial Sequence
  probe
catcagctgtaatcattcctgtgct

SEQ ID NO: 3684 - DNA, 25 bp, Artificial Sequence
  probe
cccttggtaggtattagacttgcac

SEQ ID NO: 3685 - DNA, 25 bp, Artificial Sequence
  probe
aacgcgtggcctatgcaggtggatt

SEQ ID NO: 3686 - DNA, 25 bp, Artificial Sequence
  probe
ggcctatgcaggtggattccttcag

SEQ ID NO: 3687 - DNA, 25 bp, Artificial Sequence
  probe
tgcaggtggattccttcaggtcttt

SEQ ID NO: 3688 - DNA, 25 bp, Artificial Sequence
  probe
acaggttaagaagagccgggtggca

SEQ ID NO: 3689 - DNA, 25 bp, Artificial Sequence
  probe
gttaagaagagccgggtggcagctg

SEQ ID NO: 3690 - DNA, 25 bp, Artificial Sequence
  probe
gtggcagctgacagaggaagccgct

SEQ ID NO: 3691 - DNA, 25 bp, Artificial Sequence
  probe
gaggaagccgctcaaataccttcac

SEQ ID NO: 3692 - DNA, 25 bp, Artificial Sequence
  probe
gaagccgctcaaataccttcacaat

SEQ ID NO: 3693 - DNA, 25 bp, Artificial Sequence
  probe
gagtaggttcggtctgaaaggtgtg

SEQ ID NO: 3694 - DNA, 25 bp, Artificial Sequence
  probe
ggcctttatatttgatccacacacg

SEQ ID NO: 3695 - DNA, 25 bp, Artificial Sequence
  probe
gatccacacacgttggtcttttaac

SEQ ID NO: 3696 - DNA, 25 bp, Artificial Sequence
  probe
cacgttggtcttttaaccgtgctga

SEQ ID NO: 3697 - DNA, 25 bp, Artificial Sequence
  probe
attttcatcctgcaagcaactcaaa

SEQ ID NO: 3698 - DNA, 25 bp, Artificial Sequence
  probe
attttcaaatctttgcttgataagt

SEQ ID NO: 3699 - DNA, 25 bp, Artificial Sequence
  probe
tggacttgctgccgtaatttaaagc

SEQ ID NO: 3700 - DNA, 25 bp, Artificial Sequence
  probe
ctgccgtaatttaaagctctgttga

SEQ ID NO: 3701 - DNA, 25 bp, Artificial Sequence
  probe
ggagcactgtgtttatgctggaata

SEQ ID NO: 3702 - DNA, 25 bp, Artificial Sequence
  probe
atgaagtctgagaccttccggtgct

SEQ ID NO: 3703 - DNA, 25 bp, Artificial Sequence
  probe
accttccggtgctgggaacacacaa

SEQ ID NO: 3704 - DNA, 25 bp, Artificial Sequence
  probe
cagctattgctggagtttaccgagc

SEQ ID NO: 3705 - DNA, 25 bp, Artificial Sequence
  probe
ggagtttaccgagcagcagggaagg

SEQ ID NO: 3706 - DNA, 25 bp, Artificial Sequence
  probe
atgataccatttgaagccctcacac

SEQ ID NO: 3707 - DNA, 25 bp, Artificial Sequence
  probe
gcactggacagacattttgcgtctt

SEQ ID NO: 3708 - DNA, 25 bp, Artificial Sequence
  probe
tttttacggattttagctactctat

SEQ ID NO: 3709 - DNA, 25 bp, Artificial Sequence
  probe
gctactctatagcatacatccttat

SEQ ID NO: 3710 - DNA, 25 bp, Artificial Sequence
  probe
gagtgtagtgttttcttagttcttc

SEQ ID NO: 3711 - DNA, 25 bp, Artificial Sequence
  probe
attgaagacttatgtggactcctat

SEQ ID NO: 3712 - DNA, 25 bp, Artificial Sequence
  probe
ggactcctattgttctcaaccaaaa

SEQ ID NO: 3713 - DNA, 25 bp, Artificial Sequence
  probe
taagcagttttcatgtgtaccttta

SEQ ID NO: 3714 - DNA, 25 bp, Artificial Sequence
  probe
tacctttacccaagccaagtcaaca

SEQ ID NO: 3715 - DNA, 25 bp, Artificial Sequence
  probe
tccagtgtagcctggctctgagaga

SEQ ID NO: 3716 - DNA, 25 bp, Artificial Sequence
  probe
tggagaaggttccatagtccactct

SEQ ID NO: 3717 - DNA, 25 bp, Artificial Sequence
  probe
tagtccactcttaggggaaccagca

SEQ ID NO: 3718 - DNA, 25 bp, Artificial Sequence
  probe
catggtcactacaggatggtggagc

SEQ ID NO: 3719 - DNA, 25 bp, Artificial Sequence
  probe
atggtggagcagggggcatctttta

SEQ ID NO: 3720 - DNA, 25 bp, Artificial Sequence
  probe
aggaaccggtattgcctagagcctc

SEQ ID NO: 3721 - DNA, 25 bp, Artificial Sequence
  probe
actgcccctggaagcaaagtgccta

SEQ ID NO: 3722 - DNA, 25 bp, Artificial Sequence
  probe
aaagtgcctatcagcagcgttgcgt

SEQ ID NO: 3723 - DNA, 25 bp, Artificial Sequence
  probe
gaatgtgccagaatgctgaaccttc

SEQ ID NO: 3724 - DNA, 25 bp, Artificial Sequence
  probe
gctgaaccttcttgttaatgctatg

SEQ ID NO: 3725 - DNA, 25 bp, Artificial Sequence
  probe
taatgctatgaccgtgccttgaata

SEQ ID NO: 3726 - DNA, 25 bp, Artificial Sequence
  probe
tgagagtctcactttataaaatggg

SEQ ID NO: 3727 - DNA, 25 bp, Artificial Sequence
  probe
aaatgggaacaatgattgccttaaa

SEQ ID NO: 3728 - DNA, 25 bp, Artificial Sequence
  probe
attgccttaaagggtggttgtcaag

SEQ ID NO: 3729 - DNA, 25 bp, Artificial Sequence
  probe
gtagcaaagcttacaatgcatttta

SEQ ID NO: 3730 - DNA, 25 bp, Artificial Sequence
  probe
gagttacctatcttacctgttatct

SEQ ID NO: 3731 - DNA, 25 bp, Artificial Sequence
  probe
gttacctatcttacctgttatcttc

SEQ ID NO: 3732 - DNA, 25 bp, Artificial Sequence
  probe
tatcttacctgttatcttctgctgt

SEQ ID NO: 3733 - DNA, 25 bp, Artificial Sequence
  probe
gtccttattcccagcaagggtttgg

SEQ ID NO: 3734 - DNA, 25 bp, Artificial Sequence
  probe
tattcccagcaagggtttggcaaat

SEQ ID NO: 3735 - DNA, 25 bp, Artificial Sequence
  probe
aaaacacaggctttaaagtcagaga

SEQ ID NO: 3736 - DNA, 25 bp, Artificial Sequence
  probe
cctctcagccacctaacttttgaga

SEQ ID NO: 3737 - DNA, 25 bp, Artificial Sequence
  probe
ggagtgcctcaagccaagatagtga

SEQ ID NO: 3738 - DNA, 25 bp, Artificial Sequence
  probe
ataattgagctttctcatctgtcaa

SEQ ID NO: 3739 - DNA, 25 bp, Artificial Sequence
  probe
tctgtcaaatgctatggttttctta

SEQ ID NO: 3740 - DNA, 25 bp, Artificial Sequence
  probe
ctagatctatccaccttgttttttt

SEQ ID NO: 3741 - DNA, 25 bp, Artificial Sequence
  probe
agagtcagtcattggctttgtcatt

SEQ ID NO: 3742 - DNA, 25 bp, Artificial Sequence
  probe
ggctttgtcatttaccctttgagag

SEQ ID NO: 3743 - DNA, 25 bp, Artificial Sequence
  probe
accctttgagagttccacaagtggt

SEQ ID NO: 3744 - DNA, 25 bp, Artificial Sequence
  probe
tagagtggtttaacgtctttcctct

SEQ ID NO: 3745 - DNA, 25 bp, Artificial Sequence
  probe
gtctttcctctagtactaccagtat

SEQ ID NO: 3746 - DNA, 25 bp, Artificial Sequence
  probe
aatgtataccccttactgtaatttg

SEQ ID NO: 3747 - DNA, 25 bp, Artificial Sequence
  probe
gttcctcttagaagtcagatcatct

SEQ ID NO: 3748 - DNA, 25 bp, Artificial Sequence
  probe
caggctctactttgatcttctacaa

SEQ ID NO: 3749 - DNA, 25 bp, Artificial Sequence
  probe
agatgtagccttagtcctgactgtc

SEQ ID NO: 3750 - DNA, 25 bp, Artificial Sequence
  probe
caagttcaccaattctaacacaccc

SEQ ID NO: 3751 - DNA, 25 bp, Artificial Sequence
  probe
acacccaactcctacaatcatatgg

SEQ ID NO: 3752 - DNA, 25 bp, Artificial Sequence
  probe
aatggcctctggagccgtatttctc

SEQ ID NO: 3753 - DNA, 25 bp, Artificial Sequence
  probe
ttctcacttagttctgcctgtgcaa

SEQ ID NO: 3754 - DNA, 25 bp, Artificial Sequence
  probe
gcctgtgcaacctgaaaatgccctg

SEQ ID NO: 3755 - DNA, 25 bp, Artificial Sequence
  probe
gaaaaatcatgtcccaagttctgag

SEQ ID NO: 3756 - DNA, 25 bp, Artificial Sequence
  probe
agttctgagaattgttcacactttc

SEQ ID NO: 3757 - DNA, 25 bp, Artificial Sequence
  probe
ttcacactttctaaccagagacaga

SEQ ID NO: 3758 - DNA, 25 bp, Artificial Sequence
  probe
gagacagaattcagagctctttttg

SEQ ID NO: 3759 - DNA, 25 bp, Artificial Sequence
  probe
ttcagtttccattgagagctctgtt

SEQ ID NO: 3760 - DNA, 25 bp, Artificial Sequence
  probe
aaggtatcttaggagtgcagattat

SEQ ID NO: 3761 - DNA, 25 bp, Artificial Sequence
  probe
tttgattctgggctgagttattaca

SEQ ID NO: 3762 - DNA, 25 bp, Artificial Sequence
  probe
gttattacagttatggtatgaccag

SEQ ID NO: 3763 - DNA, 25 bp, Artificial Sequence
  probe
tcctttcttatgaaccttcctgatt

SEQ ID NO: 3764 - DNA, 25 bp, Artificial Sequence
  probe
gattttttaacttagatttctcact

SEQ ID NO: 3765 - DNA, 25 bp, Artificial Sequence
  probe
gatttctcactaagtttcctgagtt

SEQ ID NO: 3766 - DNA, 25 bp, Artificial Sequence
  probe
aagtttcctgagttattagtaagat

SEQ ID NO: 3767 - DNA, 25 bp, Artificial Sequence
  probe
catttaggtgtgagttccttagctt

SEQ ID NO: 3768 - DNA, 25 bp, Artificial Sequence
  probe
ccttagcttctgcctataggaacat

SEQ ID NO: 3769 - DNA, 25 bp, Artificial Sequence
  probe
atgaaaggtcatctaggtgtgtgtt

SEQ ID NO: 3770 - DNA, 25 bp, Artificial Sequence
  probe
tgggctttaacattggagtccggct

SEQ ID NO: 3771 - DNA, 25 bp, Artificial Sequence
  probe
gaagatttcttggctcggtcaaatg

SEQ ID NO: 3772 - DNA, 25 bp, Artificial Sequence
  probe
ggcatcactccaagcattactaatt

SEQ ID NO: 3773 - DNA, 25 bp, Artificial Sequence
  probe
gcccagctggtgatgaattctccct

SEQ ID NO: 3774 - DNA, 25 bp, Artificial Sequence
  probe
ggaacttcctgataaccactcatcc

SEQ ID NO: 3775 - DNA, 25 bp, Artificial Sequence
  probe
tccaatctcttgtgtggggtgttgc

SEQ ID NO: 3776 - DNA, 25 bp, Artificial Sequence
  probe
ggtgttgcggggagctttggagatg

SEQ ID NO: 3777 - DNA, 25 bp, Artificial Sequence
  probe
ttgaggacaatcttccagctggaga

SEQ ID NO: 3778 - DNA, 25 bp, Artificial Sequence
  probe
gaggaataaccatccctacaactcg

SEQ ID NO: 3779 - DNA, 25 bp, Artificial Sequence
  probe
tgttggaatcagcaggcctctgtgc

SEQ ID NO: 3780 - DNA, 25 bp, Artificial Sequence
  probe
tcttataacctgtttccattctcca

SEQ ID NO: 3781 - DNA, 25 bp, Artificial Sequence
  probe
agtcagcagaattccatgcctgccc

SEQ ID NO: 3782 - DNA, 25 bp, Artificial Sequence
  probe
gcctgccctgatcatcatcagtaat

SEQ ID NO: 3783 - DNA, 25 bp, Artificial Sequence
  probe
gatatctgatccctgcaaaatactt

SEQ ID NO: 3784 - DNA, 25 bp, Artificial Sequence
  probe
gatatcagcatatttgtgcacctta

SEQ ID NO: 3785 - DNA, 25 bp, Artificial Sequence
  probe
tgcaccttattaagccccatcttaa

SEQ ID NO: 3786 - DNA, 25 bp, Artificial Sequence
  probe
caaagtctaagtctgctgttacaac

SEQ ID NO: 3787 - DNA, 25 bp, Artificial Sequence
  probe
gaaaggccttgttggcagtactcct

SEQ ID NO: 3788 - DNA, 25 bp, Artificial Sequence
  probe
gcagtactcctgttaagccattagt

SEQ ID NO: 3789 - DNA, 25 bp, Artificial Sequence
  probe
aagccattagtctctaaattccagc

SEQ ID NO: 3790 - DNA, 25 bp, Artificial Sequence
  probe
tgcttcacacagttccttaaaatca

SEQ ID NO: 3791 - DNA, 25 bp, Artificial Sequence
  probe
gaactttggtcatagagtcttcata

SEQ ID NO: 3792 - DNA, 25 bp, Artificial Sequence
  probe
accaagatctctgcctggcacaata

SEQ ID NO: 3793 - DNA, 25 bp, Artificial Sequence
  probe
tctcaactgtgaccacggctttgtc

SEQ ID NO: 3794 - DNA, 25 bp, Artificial Sequence
  probe
ttgccgacaaggtccacctgatgta

SEQ ID NO: 3795 - DNA, 25 bp, Artificial Sequence
  probe
ctcccccaagtaggcaggctgtagg

SEQ ID NO: 3796 - DNA, 25 bp, Artificial Sequence
  probe
gctgtaggcacttgggctgactgcc

SEQ ID NO: 3797 - DNA, 25 bp, Artificial Sequence
  probe
acagcaggcagaactctccttggat

SEQ ID NO: 3798 - DNA, 25 bp, Artificial Sequence
  probe
ttgtgggcgaggaggcgtttccacc

SEQ ID NO: 3799 - DNA, 25 bp, Artificial Sequence
  probe
tatcagggcagggtgacctactccc

SEQ ID NO: 3800 - DNA, 25 bp, Artificial Sequence
  probe
cctactccccattgttctggaaatc

SEQ ID NO: 3801 - DNA, 25 bp, Artificial Sequence
  probe
tggaaatctccaggctgctgggcag

SEQ ID NO: 3802 - DNA, 25 bp, Artificial Sequence
  probe
tgaagtcatgagtgcccgattcctc

SEQ ID NO: 3803 - DNA, 25 bp, Artificial Sequence
  probe
gtgcggggcagtgaatgcccaggca

SEQ ID NO: 3804 - DNA, 25 bp, Artificial Sequence
  probe
gaagaactgctatgagctggacctg

SEQ ID NO: 3805 - DNA, 25 bp, Artificial Sequence
  probe
gctggacctgatagctgtgcagaaa

SEQ ID NO: 3806 - DNA, 25 bp, Artificial Sequence
  223109_at
gtgagagcaggggcaccttttctac

SEQ ID NO: 3807 - DNA, 25 bp, Artificial Sequence
  probe
ggcaccttttctacgtgtgacacaa

SEQ ID NO: 3808 - DNA, 25 bp, Artificial Sequence
  probe
aatggacttgacccaactgagaagg

SEQ ID NO: 3809 - DNA, 25 bp, Artificial Sequence
  probe
aagtattggcagaccaggcgtggtg

SEQ ID NO: 3810 - DNA, 25 bp, Artificial Sequence
  probe
tagtgcgctagacggcgcctgtgaa

SEQ ID NO: 3811 - DNA, 25 bp, Artificial Sequence
  probe
cagtgggacctaaccaacatccagg

SEQ ID NO: 3812 - DNA, 25 bp, Artificial Sequence
  probe
acatccaggatgctatccgggctgc

SEQ ID NO: 3813 - DNA, 25 bp, Artificial Sequence
  probe
ggatggtcctgggactcccagggcc

SEQ ID NO: 3814 - DNA, 25 bp, Artificial Sequence
  probe
catccagactggaaacctacccatt

SEQ ID NO: 3815 - DNA, 25 bp, Artificial Sequence
  probe
tgagcatcctctagatgctgcccca

SEQ ID NO: 3816 - DNA, 25 bp, Artificial Sequence
  probe
atgctgccccaaggagttgctgcag

SEQ ID NO: 3817 - DNA, 25 bp, Artificial Sequence
  probe
tgcagttctggagcctcatctggct

SEQ ID NO: 3818 - DNA, 25 bp, Artificial Sequence
  probe
atctggctgggatctccaaggggcc

SEQ ID NO: 3819 - DNA, 25 bp, Artificial Sequence
  probe
ttaccctcccaggaatgccgtgaaa

SEQ ID NO: 3820 - DNA, 25 bp, Artificial Sequence
  probe
taacggagtgtcactttcaaccggc

SEQ ID NO: 3821 - DNA, 25 bp, Artificial Sequence
  probe
gtaatattgtcctgggcctgtgttg

SEQ ID NO: 3822 - DNA, 25 bp, Artificial Sequence
  probe
gggaagctgggcatcagtggccaca

SEQ ID NO: 3823 - DNA, 25 bp, Artificial Sequence
  probe
agtggccacatgggcatcaggggct

SEQ ID NO: 3824 - DNA, 25 bp, Artificial Sequence
  probe
tcatctatctaaccggtccttgatt

SEQ ID NO: 3825 - DNA, 25 bp, Artificial Sequence
  probe
aatacatggcttgctgcctgttgta

SEQ ID NO: 3826 - DNA, 25 bp, Artificial Sequence
  probe
atgtcaatgctgccattgccaccat

SEQ ID NO: 3827 - DNA, 25 bp, Artificial Sequence
  probe
aaccaagcgcacgatccagtttgtg

SEQ ID NO: 3828 - DNA, 25 bp, Artificial Sequence
  probe
tgccccactggcttcaaggttggca

SEQ ID NO: 3829 - DNA, 25 bp, Artificial Sequence
  probe
aaggttggcatcaactaccagcctc

SEQ ID NO: 3830 - DNA, 25 bp, Artificial Sequence
  probe
acaccacagccattgctgaggcctg

SEQ ID NO: 3831 - DNA, 25 bp, Artificial Sequence
  probe
gcctggaccacaagtttgacctgat

SEQ ID NO: 3832 - DNA, 25 bp, Artificial Sequence
  probe
gacctgatgtatgccaagcgtgcct

SEQ ID NO: 3833 - DNA, 25 bp, Artificial Sequence
  probe
ggcccgtgaagatatggctgccctt

SEQ ID NO: 3834 - DNA, 25 bp, Artificial Sequence
  probe
ctaattatccattccttttggccct

SEQ ID NO: 3835 - DNA, 25 bp, Artificial Sequence
  probe
gtcatgctcccagaatttcagcttc

SEQ ID NO: 3836 - DNA, 25 bp, Artificial Sequence
  probe
atgtcaatgctgccattgccaccat

SEQ ID NO: 3837 - DNA, 25 bp, Artificial Sequence
  probe
tgccccactggcttcaaggttggca

SEQ ID NO: 3838 - DNA, 25 bp, Artificial Sequence
  probe
aaggttggcatcaactaccagcctc

SEQ ID NO: 3839 - DNA, 25 bp, Artificial Sequence
  probe
ctcccactgtggtgcctggtggaga

SEQ ID NO: 3840 - DNA, 25 bp, Artificial Sequence
  probe
acaccacagccattgctgaggcctg

SEQ ID NO: 3841 - DNA, 25 bp, Artificial Sequence
  probe
gcctggaccacaagtttgacctgat

SEQ ID NO: 3842 - DNA, 25 bp, Artificial Sequence
  probe
gacctgatgtatgccaagcgtgcct

SEQ ID NO: 3843 - DNA, 25 bp, Artificial Sequence
  probe
ggcccgtgaagatatggctgccctt

SEQ ID NO: 3844 - DNA, 25 bp, Artificial Sequence
  probe
ctaattatccattccttttggccct

SEQ ID NO: 3845 - DNA, 25 bp, Artificial Sequence
  probe
gtcatgctcccagaatttcagcttc

SEQ ID NO: 3846 - DNA, 25 bp, Artificial Sequence
  probe
tgtcttttccatgtgtacctgtaat

SEQ ID NO: 3847 - DNA, 25 bp, Artificial Sequence
  Probe
aaatgtgaccctcgccatggtaaat

SEQ ID NO: 3848 - DNA, 25 bp, Artificial Sequence
  Probe
aatacatggcttgctgcctgttgta

SEQ ID NO: 3849 - DNA, 25 bp, Artificial Sequence
  Probe
atgtcaatgctgccattgccaccat

SEQ ID NO: 3850 - DNA, 25 bp, Artificial Sequence
  Probe
tgccccactggcttcaaggttggca

SEQ ID NO: 3851 - DNA, 25 bp, Artificial Sequence
  Probe
aaggttggcatcaactaccagcctc

SEQ ID NO: 3852 - DNA, 25 bp, Artificial Sequence
  Probe
acaccacagccattgctgaggcctg

SEQ ID NO: 3853 - DNA, 25 bp, Artificial Sequence
  Probe
gcctggaccacaagtttgacctgat

SEQ ID NO: 3854 - DNA, 25 bp, Artificial Sequence
  Probe
gacctgatgtatgccaagcgtgcct

SEQ ID NO: 3855 - DNA, 25 bp, Artificial Sequence
  Probe
ggcccgtgaagatatggctgccctt

SEQ ID NO: 3856 - DNA, 25 bp, Artificial Sequence
  Probe
ctaattatccattccttttggccct

SEQ ID NO: 3857 - DNA, 25 bp, Artificial Sequence
  Probe
gtcatgctcccagaatttcagcttc

SEQ ID NO: 3858 - DNA, 25 bp, Artificial Sequence
  Probe
aaatgtgaccctcgccatggtaaat

SEQ ID NO: 3859 - DNA, 25 bp, Artificial Sequence
  Probe
acatggcttgctgcctgttataccg

SEQ ID NO: 3860 - DNA, 25 bp, Artificial Sequence
  Probe
tataccgtggtgacgtggttcccaa

SEQ ID NO: 3861 - DNA, 25 bp, Artificial Sequence
  Probe
atgtcaatgctgccattgccaccat

SEQ ID NO: 3862 - DNA, 25 bp, Artificial Sequence
  Probe
tgccccactggcttcaaggttggca

SEQ ID NO: 3863 - DNA, 25 bp, Artificial Sequence
  Probe
ttggcattaattaccagcctcccac

SEQ ID NO: 3864 - DNA, 25 bp, Artificial Sequence
  Probe
gcctggaccacaagtttgacctgat

SEQ ID NO: 3865 - DNA, 25 bp, Artificial Sequence
  Probe
gacctgatgtatgccaagcgtgcct

SEQ ID NO: 3866 - DNA, 25 bp, Artificial Sequence
  Probe
cgtgaggacatggctgcccttgaga

SEQ ID NO: 3867 - DNA, 25 bp, Artificial Sequence
  Probe
gtgtgctgtacttttacactccttt

SEQ ID NO: 3868 - DNA, 25 bp, Artificial Sequence
  Probe
tacactcctttgtcttggaactgtc

SEQ ID NO: 3869 - DNA, 25 bp, Artificial Sequence
  Probe
aaatgtgaccctcgccatggtaaat

SEQ ID NO: 3870 - DNA, 25 bp, Artificial Sequence
  Probe
acatggcttgctgcctgttataccg

SEQ ID NO: 3871 - DNA, 25 bp, Artificial Sequence
  Probe
tataccgtggtgacgtggttcccaa

SEQ ID NO: 3872 - DNA, 25 bp, Artificial Sequence
  Probe
atgtcaatgctgccattgccaccat

SEQ ID NO: 3873 - DNA, 25 bp, Artificial Sequence
  Probe
tgccccactggcttcaaggttggca

SEQ ID NO: 3874 - DNA, 25 bp, Artificial Sequence
  Probe
ttggcattaattaccagcctcccac

SEQ ID NO: 3875 - DNA, 25 bp, Artificial Sequence
  Probe
gcaataccacagctgttgccgaggc

SEQ ID NO: 3876 - DNA, 25 bp, Artificial Sequence
  Probe
gcctggaccacaagtttgacctgat

SEQ ID NO: 3877 - DNA, 25 bp, Artificial Sequence
  Probe
gacctgatgtatgccaagcgtgcct

SEQ ID NO: 3878 - DNA, 25 bp, Artificial Sequence
  Probe
cgtgaggacatggctgcccttgaga

SEQ ID NO: 3879 - DNA, 25 bp, Artificial Sequence
  Probe
tacactcctttgtcttggaactgtc

SEQ ID NO: 3880 - DNA, 25 bp, Artificial Sequence
  Probe
aaatgtgaccctcgccatggtaaat

SEQ ID NO: 3881 - DNA, 25 bp, Artificial Sequence
  Probe
ccgtggtgacgtggttcccaaagat

SEQ ID NO: 3882 - DNA, 25 bp, Artificial Sequence
  Probe
atgtcaatgctgccattgccaccat

SEQ ID NO: 3883 - DNA, 25 bp, Artificial Sequence
  Probe
agtttgtggattggtgccccactgg

SEQ ID NO: 3884 - DNA, 25 bp, Artificial Sequence
  Probe
ctcccactgtggtgcctggtggaga

SEQ ID NO: 3885 - DNA, 25 bp, Artificial Sequence
  Probe
gagagctgtgtgcatgctgagcaac

SEQ ID NO: 3886 - DNA, 25 bp, Artificial Sequence
  Probe
gcctttgttcactggtacgtgggtg

SEQ ID NO: 3887 - DNA, 25 bp, Artificial Sequence
  Probe
ggcccgtgaagatatggctgccctt

SEQ ID NO: 3888 - DNA, 25 bp, Artificial Sequence
  Probe
ctaattatccattccttttggccct

SEQ ID NO: 3889 - DNA, 25 bp, Artificial Sequence
  Probe
gatcaccaatgcttgctttgagcca

SEQ ID NO: 3890 - DNA, 25 bp, Artificial Sequence
  Probe
gctttgagccagccaaccagatggt

SEQ ID NO: 3891 - DNA, 25 bp, Artificial Sequence
  Probe
acacgtgcttgtggacatcagcctc

SEQ ID NO: 3892 - DNA, 25 bp, Artificial Sequence
  Probe
cctgccagcagttcttgaagcttct

SEQ ID NO: 3893 - DNA, 25 bp, Artificial Sequence
  Probe
acctgtatttctcagttgcagcact

SEQ ID NO: 3894 - DNA, 25 bp, Artificial Sequence
  Probe
cccatgcatctgcctggcatttagg

SEQ ID NO: 3895 - DNA, 25 bp, Artificial Sequence
  Probe
tggcatttaggcagcagagcccctg

SEQ ID NO: 3896 - DNA, 25 bp, Artificial Sequence
  Probe
tcctcatctcatttggctgtgtaaa

SEQ ID NO: 3897 - DNA, 25 bp, Artificial Sequence
  Probe
gcaattgaggcagttgaccatattc

SEQ ID NO: 3898 - DNA, 25 bp, Artificial Sequence
  Probe
tccaagtccaccagtctctgaaatt

SEQ ID NO: 3899 - DNA, 25 bp, Artificial Sequence
  Probe
ggagtggaatgttctatccccacaa

SEQ ID NO: 3900 - DNA, 25 bp, Artificial Sequence
  Probe
tagacttgtcttgttcagattctgt

SEQ ID NO: 3901 - DNA, 25 bp, Artificial Sequence
  Probe
tcagattctgtatttacccatttta

SEQ ID NO: 3902 - DNA, 25 bp, Artificial Sequence
  Probe
aagtgaggactgttggctgattgga

SEQ ID NO: 3903 - DNA, 25 bp, Artificial Sequence
  Probe
aaacgcacttaggaactttgcctgt

SEQ ID NO: 3904 - DNA, 25 bp, Artificial Sequence
  Probe
gtctgaccaccggggatgtgattgc

SEQ ID NO: 3905 - DNA, 25 bp, Artificial Sequence
  Probe
acgaactgcgtgtgatggagaccaa

SEQ ID NO: 3906 - DNA, 25 bp, Artificial Sequence
  Probe
gagaccaaacccgacaaggcagtgt

SEQ ID NO: 3907 - DNA, 25 bp, Artificial Sequence
  Probe
gtgtgacatgaacgtggactttgat

SEQ ID NO: 3908 - DNA, 25 bp, Artificial Sequence
  Probe
tgctcccctgggctacaaagaaccc

SEQ ID NO: 3909 - DNA, 25 bp, Artificial Sequence
  Probe
gacaagtccagcatgaggagtcgac

SEQ ID NO: 3910 - DNA, 25 bp, Artificial Sequence
  Probe
cgctttctctggatctggcaataga

SEQ ID NO: 3911 - DNA, 25 bp, Artificial Sequence
  Probe
ccctccccaatcaagcctggagata

SEQ ID NO: 3912 - DNA, 25 bp, Artificial Sequence
  Probe
tcacgtccccttgtcaaaaaggttg

SEQ ID NO: 3913 - DNA, 25 bp, Artificial Sequence
  probe
cgcccaaggacctgggctacatcta

SEQ ID NO: 3914 - DNA, 25 bp, Artificial Sequence
  probe
gctacatctacttctaccagagagt

SEQ ID NO: 3915 - DNA, 25 bp, Artificial Sequence
  probe
agagtggccagctaagagcctgcct

SEQ ID NO: 3916 - DNA, 25 bp, Artificial Sequence
  probe
tgcctcaccccttaccaatgagggc

SEQ ID NO: 3917 - DNA, 25 bp, Artificial Sequence
  probe
caatgagggcaggggaagaccacct

SEQ ID NO: 3918 - DNA, 25 bp, Artificial Sequence
  probe
agaccacctggcatgagggagaggg

SEQ ID NO: 3919 - DNA, 25 bp, Artificial Sequence
  probe
ctgagggatggacttcagcccctct

SEQ ID NO: 3920 - DNA, 25 bp, Artificial Sequence
  probe
ggaggccgtgggagaatggctgggc

SEQ ID NO: 3921 - DNA, 25 bp, Artificial Sequence
  probe
ggggcagcgatagactctggggatg

SEQ ID NO: 3922 - DNA, 25 bp, Artificial Sequence
  probe
gtaaggagactttgttgcttcccct

SEQ ID NO: 3923 - DNA, 25 bp, Artificial Sequence
  probe
tgcgcgtgggtgtagctttgtgcat

SEQ ID NO: 3924 - DNA, 25 bp, Artificial Sequence
  Probe
gagaaagtgctgcgctacgagacct

SEQ ID NO: 3925 - DNA, 25 bp, Artificial Sequence
  Probe
gagaccttcatcagtgacgtgctgc

SEQ ID NO: 3926 - DNA, 25 bp, Artificial Sequence
  Probe
gcagctggccaaataccttcaactg

SEQ ID NO: 3927 - DNA, 25 bp, Artificial Sequence
  Probe
ggatttgggctgtaacttcttcgtt

SEQ ID NO: 3928 - DNA, 25 bp, Artificial Sequence
  Probe
tcttcgttgacacagtggtcccaga

SEQ ID NO: 3929 - DNA, 25 bp, Artificial Sequence
  Probe
ccaaccgttcttattgctggcggcc

SEQ ID NO: 3930 - DNA, 25 bp, Artificial Sequence
  Probe
atacttcacgcatctatgtggccct

SEQ ID NO: 3931 - DNA, 25 bp, Artificial Sequence
  Probe
gacactggcagaagctctcaagttc

SEQ ID NO: 3932 - DNA, 25 bp, Artificial Sequence
  Probe
aaagcccatatccacatgttgctag

SEQ ID NO: 3933 - DNA, 25 bp, Artificial Sequence
  Probe
acaaggcctgcagaatttcccagag

SEQ ID NO: 3934 - DNA, 25 bp, Artificial Sequence
  Probe
ttcccagagaagcctcaccattgac

SEQ ID NO: 3935 - DNA, 25 bp, Artificial Sequence
  Probe
acccaacttgattcagcgacccaag

SEQ ID NO: 3936 - DNA, 25 bp, Artificial Sequence
  Probe
gcgacccaaggcggatgatacaagt

SEQ ID NO: 3937 - DNA, 25 bp, Artificial Sequence
  Probe
gatacaagtgcagccaccattgaga

SEQ ID NO: 3938 - DNA, 25 bp, Artificial Sequence
  Probe
gaaagccacagcaaccatcagtgcc

SEQ ID NO: 3939 - DNA, 25 bp, Artificial Sequence
  Probe
tgccaagccacagatcactaatccc

SEQ ID NO: 3940 - DNA, 25 bp, Artificial Sequence
  Probe
cagagattactcgatttgtgcccac

SEQ ID NO: 3941 - DNA, 25 bp, Artificial Sequence
  Probe
gaataaaggggctactgctgctccc

SEQ ID NO: 3942 - DNA, 25 bp, Artificial Sequence
  Probe
aaagcagcacccaaatctggtcctt

SEQ ID NO: 3943 - DNA, 25 bp, Artificial Sequence
  Probe
tgttcctgtctcagtacaaactaag

SEQ ID NO: 3944 - DNA, 25 bp, Artificial Sequence
  Probe
gctactgtgacagcttttgatgcca

SEQ ID NO: 3945 - DNA, 25 bp, Artificial Sequence
  Probe
ggcttctgttcacaacagtggccca

SEQ ID NO: 3946 - DNA, 25 bp, Artificial Sequence
  probe
tagccttgttcagaatttactgcac

SEQ ID NO: 3947 - DNA, 25 bp, Artificial Sequence
  probe
aaaagggtatttcatccagaataga

SEQ ID NO: 3948 - DNA, 25 bp, Artificial Sequence
  probe
gatcagttattgaagcagtgctgct

SEQ ID NO: 3949 - DNA, 25 bp, Artificial Sequence
  probe
aagcagtgctgctaacatccattcc

SEQ ID NO: 3950 - DNA, 25 bp, Artificial Sequence
  probe
cctcctccagttctttggaaatttg

SEQ ID NO: 3951 - DNA, 25 bp, Artificial Sequence
  probe
gatcgggggatcttagttgcttatt

SEQ ID NO: 3952 - DNA, 25 bp, Artificial Sequence
  probe
tgcttatttgttttgactcttgtgt

SEQ ID NO: 3953 - DNA, 25 bp, Artificial Sequence
  probe
tgactcttgtgtgctgtgggcactg

SEQ ID NO: 3954 - DNA, 25 bp, Artificial Sequence
  probe
gtgggcactggagtagagatttctg

SEQ ID NO: 3955 - DNA, 25 bp, Artificial Sequence
  probe
ggatcacaatgtcatttcctaatac

SEQ ID NO: 3956 - DNA, 25 bp, Artificial Sequence
  probe
tatttcccactgacctaaactttca

SEQ ID NO: 3957 - DNA, 25 bp, Artificial Sequence
  Probe
gctcagcatgccttgaggggaggag

SEQ ID NO: 3958 - DNA, 25 bp, Artificial Sequence
  Probe
cgtgggttcctgatgtcggtgcagg

SEQ ID NO: 3959 - DNA, 25 bp, Artificial Sequence
  Probe
gatgactttgtgaacattcccaggt

SEQ ID NO: 3960 - DNA, 25 bp, Artificial Sequence
  Probe
cattcccaggtattggagcctctgt

SEQ ID NO: 3961 - DNA, 25 bp, Artificial Sequence
  Probe
tggagcctctgtggccttaaatgtg

SEQ ID NO: 3962 - DNA, 25 bp, Artificial Sequence
  Probe
tggagggagacccagcatagccagg

SEQ ID NO: 3963 - DNA, 25 bp, Artificial Sequence
  Probe
tagccaggccagtatggagcacctc

SEQ ID NO: 3964 - DNA, 25 bp, Artificial Sequence
  Probe
ctcacgcacagctctcagaagctgc

SEQ ID NO: 3965 - DNA, 25 bp, Artificial Sequence
  Probe
gctgcaggcggacgaacatctgacc

SEQ ID NO: 3966 - DNA, 25 bp, Artificial Sequence
  Probe
aaagaggtgtggtcgaggctcctga

SEQ ID NO: 3967 - DNA, 25 bp, Artificial Sequence
  Probe
acagagactgagtcactggcccatc

SEQ ID NO: 3968 - DNA, 25 bp, Artificial Sequence
  Probe
tatgtttcaatctgtccatctacca

SEQ ID NO: 3969 - DNA, 25 bp, Artificial Sequence
  Probe
atctaccaggcctcgcgataaaaac

SEQ ID NO: 3970 - DNA, 25 bp, Artificial Sequence
  Probe
gtctcaaaaccatcaggatcctgcc

SEQ ID NO: 3971 - DNA, 25 bp, Artificial Sequence
  Probe
tcctgccaccagggttcttttgaaa

SEQ ID NO: 3972 - DNA, 25 bp, Artificial Sequence
  Probe
ggctttcacttcatctaatcactga

SEQ ID NO: 3973 - DNA, 25 bp, Artificial Sequence
  Probe
aaggaaggccagagagccgcgcagt

SEQ ID NO: 3974 - DNA, 25 bp, Artificial Sequence
  Probe
gacaccaagcgccctatgttgcttg

SEQ ID NO: 3975 - DNA, 25 bp, Artificial Sequence
  Probe
tgacgtggtcttggagcttctgact

SEQ ID NO: 3976 - DNA, 25 bp, Artificial Sequence
  Probe
tctgactagttcagactgccacgcc

SEQ ID NO: 3977 - DNA, 25 bp, Artificial Sequence
  Probe
gaaaataccccacatgccagaaaag

SEQ ID NO: 3978 - DNA, 25 bp, Artificial Sequence
  Probe
gtgaagtcctaggtgtttccatcta

SEQ ID NO: 3979 - DNA, 25 bp, Artificial Sequence
  Probe
gacgaacccttcgctataagcagtc

SEQ ID NO: 3980 - DNA, 25 bp, Artificial Sequence
  Probe
ataagcagtcatgcaggtcttccct

SEQ ID NO: 3981 - DNA, 25 bp, Artificial Sequence
  Probe
tggagctggatctccaggcgtcgag

SEQ ID NO: 3982 - DNA, 25 bp, Artificial Sequence
  Probe
gccgagcggcagacaagacagacca

SEQ ID NO: 3983 - DNA, 25 bp, Artificial Sequence
  Probe
gactaccgtcatgagcaggcggctg

SEQ ID NO: 3984 - DNA, 25 bp, Artificial Sequence
  Probe
gcctccaaggagatctaccagctgc

SEQ ID NO: 3985 - DNA, 25 bp, Artificial Sequence
  Probe
caaagagcccatccaagtgcagacc

SEQ ID NO: 3986 - DNA, 25 bp, Artificial Sequence
  Probe
gatagcattcttcacaaggccaagg

SEQ ID NO: 3987 - DNA, 25 bp, Artificial Sequence
  Probe
ggccaaggatcaacatacctcctct

SEQ ID NO: 3988 - DNA, 25 bp, Artificial Sequence
  Probe
tcccagccgacgacgtctgatggag

SEQ ID NO: 3989 - DNA, 25 bp, Artificial Sequence
  Probe
gaagtatttatccacctgttttatt

SEQ ID NO: 3990 - DNA, 25 bp, Artificial Sequence
  Probe
tggatagaaccataacttacacatg

SEQ ID NO: 3991 - DNA, 25 bp, Artificial Sequence
  Probe
aagtcatatactagatccaatacta

SEQ ID NO: 3992 - DNA, 25 bp, Artificial Sequence
  Probe
ggaaggattcattgagcagcataga

SEQ ID NO: 3993 - DNA, 25 bp, Artificial Sequence
  Probe
gtttgtttacatgttactttgagat

SEQ ID NO: 3994 - DNA, 25 bp, Artificial Sequence
  Probe
ctttgagatgctaggtatttgtgga

SEQ ID NO: 3995 - DNA, 25 bp, Artificial Sequence
  Probe
aagaatcaggctcttttgtactttg

SEQ ID NO: 3996 - DNA, 25 bp, Artificial Sequence
  Probe
gtttttaaatctgtgatgcttttca

SEQ ID NO: 3997 - DNA, 25 bp, Artificial Sequence
  Probe
aattgatgcaatttcatacttagga

SEQ ID NO: 3998 - DNA, 25 bp, Artificial Sequence
  Probe
atgtaaactctgccacttttttgtg

SEQ ID NO: 3999 - DNA, 25 bp, Artificial Sequence
  Probe
ggtttttatgaagccagatggattg

SEQ ID NO: 4000 - DNA, 25 bp, Artificial Sequence
  Probe
aatataaggctaatgattttctgtt

SEQ ID NO: 4001 - DNA, 25 bp, Artificial Sequence
  Probe
aactgaggcagcatgcacggaggcg

SEQ ID NO: 4002 - DNA, 25 bp, Artificial Sequence
  Probe
aggggagacgaggccaagctgagga

SEQ ID NO: 4003 - DNA, 25 bp, Artificial Sequence
  Probe
agcccttgtcagattcacccagggt

SEQ ID NO: 4004 - DNA, 25 bp, Artificial Sequence
  Probe
ttgctaggagatactcttctgcctc

SEQ ID NO: 4005 - DNA, 25 bp, Artificial Sequence
  Probe
ggaagccaccgggagatttctggat

SEQ ID NO: 4006 - DNA, 25 bp, Artificial Sequence
  Probe
tgaatgcgctgatcgtttcttccag

SEQ ID NO: 4007 - DNA, 25 bp, Artificial Sequence
  Probe
ccagttagagtcttcatctgtccga

SEQ ID NO: 4008 - DNA, 25 bp, Artificial Sequence
  Probe
tcatctgtccgacaagttcactcgc

SEQ ID NO: 4009 - DNA, 25 bp, Artificial Sequence
  Probe
tcaggcttactaatgctgccctcac

SEQ ID NO: 4010 - DNA, 25 bp, Artificial Sequence
  Probe
ccctcactgcctctttgcagtaggg

SEQ ID NO: 4011 - DNA, 25 bp, Artificial Sequence
  Probe
ggtcatctgctgggatctagttttc

SEQ ID NO: 4012 - DNA, 25 bp, Artificial Sequence
  probe
gttgtggtggaggtgatttgggata

SEQ ID NO: 4013 - DNA, 25 bp, Artificial Sequence
  probe
gggatagactaggtttccttatgca

SEQ ID NO: 4014 - DNA, 25 bp, Artificial Sequence
  probe
tgagctcctcatagaaaccagacct

SEQ ID NO: 4015 - DNA, 25 bp, Artificial Sequence
  probe
ttagacagtaacctctaacctcacc

SEQ ID NO: 4016 - DNA, 25 bp, Artificial Sequence
  probe
caagcccaagtatatggccctgctg

SEQ ID NO: 4017 - DNA, 25 bp, Artificial Sequence
  probe
ggttacctggtgactacatttccca

SEQ ID NO: 4018 - DNA, 25 bp, Artificial Sequence
  probe
acatttcccagattcactctaaatt

SEQ ID NO: 4019 - DNA, 25 bp, Artificial Sequence
  probe
tatatgccctagagctgctccagca

SEQ ID NO: 4020 - DNA, 25 bp, Artificial Sequence
  probe
gaaatcagatgacacctgactgcaa

SEQ ID NO: 4021 - DNA, 25 bp, Artificial Sequence
  probe
gcaaatagccttcttacattttggt

SEQ ID NO: 4022 - DNA, 25 bp, Artificial Sequence
  probe
caaatcatcaggttcctcgggttta

SEQ ID NO: 4023 - DNA, 25 bp, Artificial Sequence
  probe
gaaaaatctgtgtacatgtagcaaa

SEQ ID NO: 4024 - DNA, 25 bp, Artificial Sequence
  probe
taggaatctcctgcaaactcctaca

SEQ ID NO: 4025 - DNA, 25 bp, Artificial Sequence
  probe
ttccaagtgcatcccttattctata

SEQ ID NO: 4026 - DNA, 25 bp, Artificial Sequence
  probe
agagatgcagcaaagtgttcactaa

SEQ ID NO: 4027 - DNA, 25 bp, Artificial Sequence
  probe
gttcactaagagtgtttatcttgcc

SEQ ID NO: 4028 - DNA, 25 bp, Artificial Sequence
  probe
gaatggtagagcaacctgaaggatt

SEQ ID NO: 4029 - DNA, 25 bp, Artificial Sequence
  probe
aaatctttgcagttatgctatttgt

SEQ ID NO: 4030 - DNA, 25 bp, Artificial Sequence
  probe
gcagtagcttgcagtttcagttgag

SEQ ID NO: 4031 - DNA, 25 bp, Artificial Sequence
  probe
gtttcagttgagttctacttagaaa

SEQ ID NO: 4032 - DNA, 25 bp, Artificial Sequence
  probe
gaaattctttttagctagtgggcat

SEQ ID NO: 4033 - DNA, 25 bp, Artificial Sequence
  probe
gatatttagtcacccagaggagcca

SEQ ID NO: 4034 - DNA, 25 bp, Artificial Sequence
  probe
gtatcagtgtgcctgaaccttgcat

SEQ ID NO: 4035 - DNA, 25 bp, Artificial Sequence
  probe
tgaaccttgcatatccttcacatat

SEQ ID NO: 4036 - DNA, 25 bp, Artificial Sequence
  probe
ttcccataagcccctcagaaaggct

SEQ ID NO: 4037 - DNA, 25 bp, Artificial Sequence
  probe
ttagatgtctatttggtggctcctg

SEQ ID NO: 4038 - DNA, 25 bp, Artificial Sequence
  probe
gtggctcctgttaaagacgcaccag

SEQ ID NO: 4039 - DNA, 25 bp, Artificial Sequence
  probe
gacgcaccagtgtaaaatgttcctg

SEQ ID NO: 4040 - DNA, 25 bp, Artificial Sequence
  probe
tcctgtagtcactgtttgtacttgt

SEQ ID NO: 4041 - DNA, 25 bp, Artificial Sequence
  probe
gcatggggttgccagtaccacaaaa

SEQ ID NO: 4042 - DNA, 25 bp, Artificial Sequence
  probe
gagacatctgtgattgttctattac

SEQ ID NO: 4043 - DNA, 25 bp, Artificial Sequence
  probe
agagagactttaacgccattgcctg

SEQ ID NO: 4044 - DNA, 25 bp, Artificial Sequence
  probe
gccattgcctggttacttgttttat

SEQ ID NO: 4045 - DNA, 25 bp, Artificial Sequence
  probe
atggcagtagcaagcttttctgttg

SEQ ID NO: 4046 - DNA, 25 bp, Artificial Sequence
  probe
aatctagtataccttgcttacccag

SEQ ID NO: 4047 - DNA, 25 bp, Artificial Sequence
  probe
taccttgcttacccaggaggatggt

SEQ ID NO: 4048 - DNA, 25 bp, Artificial Sequence
  probe
ggaggatggttgttaggtggaaatt

SEQ ID NO: 4049 - DNA, 25 bp, Artificial Sequence
  probe
taaattcataggaaccaacttttgg

SEQ ID NO: 4050 - DNA, 25 bp, Artificial Sequence
  probe
tttggtaagtaagtagttcagaggc

SEQ ID NO: 4051 - DNA, 25 bp, Artificial Sequence
  probe
gttcagaggctacaaactgttgact

SEQ ID NO: 4052 - DNA, 25 bp, Artificial Sequence
  probe
atgttttcttgcaggatacctttta

SEQ ID NO: 4053 - DNA, 25 bp, Artificial Sequence
  probe
ttacatgcaagttcagatcacctct

SEQ ID NO: 4054 - DNA, 25 bp, Artificial Sequence
  probe
aaatctgggccgggagtgagccact

SEQ ID NO: 4055 - DNA, 25 bp, Artificial Sequence
  probe
gtagcctagtggtagtgggcacctg

SEQ ID NO: 4056 - DNA, 23 bp, Artificial Sequence
  primer
cccttgaacctcctcgttcgacc

SEQ ID NO: 4057 - DNA, 23 bp, Artificial Sequence
  primer
gagacgtgctacttccatttgtc

SEQ ID NO: 4058 - DNA, 20 bp, Artificial Sequence
  primer
gctgacgtcatcaacccgct

SEQ ID NO: 4059 - DNA, 19 bp, Artificial Sequence
  short hairpin sequence targeting USP9X
gaacaggagaaacgggtat

SEQ ID NO: 4060 - DNA, 19 bp, Artificial Sequence
  short hairpin sequence targeting USP9X
ggaaatgcttagctgagaa

SEQ ID NO: 4061 - DNA, 19 bp, Artificial Sequence
  short hairpin sequence targeting USP9X
ccatggtaatcattacagt

SEQ ID NO: 4062 - DNA, 19 bp, Artificial Sequence
  short hairpin sequence targeting USP9X
cgaacaggtttgctgtgaa

SEQ ID NO: 4063 - DNA, 19 bp, Artificial Sequence
  short hairpin sequence targeting USP9X
ctacatgattccttccatt

SEQ ID NO: 4064 - DNA, 19 bp, Artificial Sequence
  short hairpin sequence targeting USP9X
ggaacagtatgtcaaagga

SEQ ID NO: 4065 - DNA, 20 bp, Artificial Sequence
  primer
aaggtgaaggtcggagtcaa

SEQ ID NO: 4066 - DNA, 20 bp, Artificial Sequence
  primer
aatgaaggggtcattgatgg

SEQ ID NO: 4067 - DNA, 20 bp, Artificial Sequence
  primer
atgatcaactgggcgaagag

SEQ ID NO: 4068 - DNA, 20 bp, Artificial Sequence
  primer
caggatctctagccaggcac

SEQ ID NO: 4069 - DNA, 20 bp, Artificial Sequence
  primer
gtccttacctgtgggagctg

SEQ ID NO: 4070 - DNA, 20 bp, Artificial Sequence
  primer
cgatgcagtcatttcttcca

SEQ ID NO: 4071 - DNA, 20 bp, Artificial Sequence
  primer
ggagaacaaggtgatctgcg

SEQ ID NO: 4072 - DNA, 20 bp, Artificial Sequence
  primer
aattctgtctttcacggggg

1-13. (canceled)

14. A method of typing a sample from a breast cancer patient that has been treated with tamoxifen, the method comprising:
determining a level of expression for USP9X and/or for at least two genes that are selected from Table 1 in a relevant sample from the breast cancer patient that has been treated with tamoxifen, whereby the sample comprises expression products from a cancer cell of the patient;
comparing said determined level of expression of USP9X or of the at least two genes to the level of expression of USP9X or the at least two genes in a reference;
typing said sample as being responsive to treatment with tamoxifen or not, based on the comparison of the determined levels of expression.

15. A method of typing a sample from a breast cancer patient according to claim 14, the method comprising:
determining a level of expression for at least two genes that are selected from Table 1 in a relevant sample from the breast cancer patient, whereby the sample comprises expression products from a cancer cell of the patient;
comparing said determined level of expression of the at least two genes to the level of expression of the at least two genes in a reference;
typing said sample as being responsive to treatment with tamoxifen or not, based on the comparison of the determined levels of expression.

16. The method according to claim 14, wherein the reference is a measure of the average level of said at least two genes in at least 10 independent individuals.

17. The method according to claim 14, whereby the sample is typed by determining a level of RNA expression for at least five genes that are selected from Table 1 and comparing said determined RNA level of expression to the level of RNA expression of the at least five genes in a reference.

18. The method according to claim 14, whereby a level of expression of at least ten genes from Table 1 is determined.

19. The method according to claim 14, whereby a level of expression of all genes from Table 1 is determined.

20. A method of assigning anti-estrogen receptor-directed therapy comprising tamoxifen to a breast cancer patient, comprising
typing a sample from the breast cancer patient with a method according to claim 14; and
assigning anti-estrogen receptor-directed therapy comprising tamoxifen to a patient of which the sample is typed as being responsive to treatment with tamoxifen.

21. A method of assigning further antiER directed therapy or chemotherapy to a breast cancer patient, comprising
typing a sample from the breast cancer patient with a method according to claim 14; and
assigning chemotherapy to a patient of which the sample is typed as being non-responsive to treatment with tamoxifen.

22. The method according to claim 21, whereby the further antiER directed therapy comprises the administration of a selective estrogen receptor modulator not being tamoxifen, an aromatase inhibitor, and/or GnRH or a GnRH-analogue.

23. The method according to claim 21, whereby the chemotherapy comprises anastrozole.

24. The method of claim 21, whereby the chemotherapy comprises administration of a platinum agent and/or a PARP inhibitor.

25. The method of claim 21, whereby the chemotherapy comprises cisplatin.

26. The method of claim 21, whereby the chemotherapy comprises ABT-888
